United States Patent Application Publication US 2022/0211063 A1 - sequence listing, part 29

SEQ ID NO: 65 - DNA, 233302 bp, Penicillium roqueforti
  misc_feature (10466)..(10484): n is a, c, g, or t
  misc_feature (32383)..(32402): n is a, c, g, or t
  misc_feature (34434)..(40754): n is a, c, g, or t
  misc_feature (41774)..(47965): n is a, c, g, or t
  misc_feature (53628)..(53891): n is a, c, g, or t
  misc_feature (86812)..(86830): n is a, c, g, or t
  misc_feature (112763)..(112967): n is a, c, g, or t
  misc_feature (199180)..(199388): n is a, c, g, or t
ggtcgtatgtggtggcggctcgtatgtgaattacgttatggatgggatagattcgtttgacttatggaggtttacacattaacggggtcgattttaataggacgtagctgtatgcaactaatagttactagttgaacctcagaatgcaagtagatcagcacaattcagttaacatttcccaagacatacatatttctcggccaaattgaatagagcgatagtcaccgggaaaagattccccaagtggggaaatttcggctattgcatgggtagctgtcagcaatcgagaaccctggaaggaacagttaattacatacacagattgcggactcccctccacatcgactgtttttgcatcccctctcaaaaccatggcgcataacaatctcagccccgaagagatcgaaagagcatcccagcttctaagtgcacaagaaaaagccgtcgcgctcttcgaggagatcgaacgcgatttggtccgaccaggaatcaccgaaaagaccctaaatgccgaaatctaccaactaggactcgatcgctatggtatcaagacccattggcacaaacgagtcatccgcagcggaccaaacaccctaagcccgttcaacgataaccctccggatcgtgtcatccagccggatgatatcctagttgttgacctggggccggtcttcgaagcctgggaagccgactttgggcgcaccttcgtcctaggagatgatccaaacaagaagaagctgcgggacgccctggagcccatctggaacacagtcaaggcaaaatatcgcgagaacccagatatgtcgggcgacgaactatacaatatctcctgccaggttgcgaaacaagatggctgggatttcggcgcggatattgcgggccatctcgttgggtcgttcccgcatgaacgcattccgcgggacagaatctccctgtatatcgccaagggcaataatgagtcaatgggtctgtcgggccgtgatgggttcaagcgtcattggattctggaaattcatcttcatgataaggcacgcgggtatggtggtttctacgagcaactcttgacggttgattaggctttctgggatgtttctatgcaagtcatactacttattgcgatggacgcaattcatggattcctcgctgttgctttccgttgagtgtactatgtatgtctttaatgcggcggacataattcatcaagaccttcttctaacgcgtgaaagaaccgagcgccttgtttaagtatccagacagtgcattcgggatggttctatgtgcagttttaggatatgccagattgataggcctttaatttagccctcagcctcgtaggagttcgacttgtgcttgggctcgaacttgaaagtgtcgggtgcaggacccaggaacatttcactgtagtatcaatgaatgattagttaatgagtcaaaaacgttaatgaaagaaaacttacgtgatcttgatccagtccttgtagtttccactgcccattagcgtctccaactcattgcggccgcgccaagcaggaggtctgtcctgaatgttaggagggaggtgctccaacagtccaattgggacatagcgataggcaaagctgagccactctagcatgaagcggcgggttgttccaacaccatgctcatcagagccccaggcctgaagaccgtacttggcgaacttttcaatataggccagacgctcagtcgcggacttatccaaatactggccggtttgaatttcctcaaagatccatggcttgatcaaagctccacgagccaccatcacagagtccacaccagcattgttgacgtggtcatcgtagtcggtatgcgagtagcagtcgccgtttccaacgaaataagtcttgccgccattgggcatgtggcgggcatccggttcacgaatggtgtcggtcagtgcatcctgcttcttgtttaggcgctttatgagggctgcacagtctgagatgtatccccagtctgcttgtcgagtgtagcgctgctgtctactacgtccatgcagggtgatggctgcggcgcctggggggcccaggtccagaacactagattcatatccaccaagaaccatacgctcaaccagcttctgggcggtaggttggttatccttggttcccatgcgaatcttgacggtaatcggaatctccagcgagacagtgttcataccgcgaatcatcttctctaatttggagtgatgatcaagaagagctgagccagctccatcacggaatacaagctcaatggggcagccgcagttcaagtcaataacgcgcaggttgggtgtaaacttcgacaacacctcagtagccttgagagcttgccatggcttgttggcggcaatttgtgcgccgaacttgaaatctttggagttatcatagccctgaacaacattgtcgcctgggatgacggttggcggtgtcatttccgactcgtgcgccttcaacagggtccattcggactttgagccttgaatcaaaggcatactcatagccatctctgagtatgtaaactgcgcgcccaggtctgtacagagtcttcggaatggcatgttgccttgggttgtgagaggtgccagaacaggtgtctccggtccaaaataaatgcgacgcttctctgacggcatgaagggaggctcaaggaactgagcacggttctcctgcaggtcgatcttcgcctgctcgtccggttcaacaagctcacccttctcgcgaatagtggatcgctggtggatcgccttctccaattcggcagacacttgaacggaccatgtggtgtaggcatcagcccggggggtgtcctcgcgctttctcgtaagtgccattttgtcttgattggaaatgatgttgacaattccctcgggtgtggcgtgggccacacgaggccgagctttctccatacgttctgcgtcctcaagcaagatcaattctttcttgccgtcttcagtctctctctcggttgagtgtgagccaaccatgcgacatttccagccggaagagcatttccctagcgcttcgtagacgggacacatgttgttcagggttgtgagatcctcgcgtttatggtctttcaaataaacacgcagatcgtgctcaaatcggcatttctcgccatattggcactctccggcggcaaattcgttggcgaacattctcgtgctgcagagacccttcgcatctttagatgtaccgtaagtgcgattggtgttctggcccttcttcttcttctttcccttgtccttcttgccaccgtcacgatcatcgtgggcagcgccctcggcggcatcatcagtgttagtttcatcggcagggcgaggcttgggtgtgatatgaatgcgatacctgattgatgaaagttagtacttcataatcattgaggggtagctggacgtactctgctttgataggtgcaattcctctgtcgcgcatatctacctgggcgggttttgaaggttcatccaatcgtgccttcttggctggaggctcttccacatccgctgcgccaggatcatttgcggcgtcgcgcttcggaatctcattgtcaggcgtagcaacattagccactggggtttgggcctgtatagtctctggctccattgtatttagagggaaaagcgaactgttcactaaacttcgcaatcgctatcggaggaacattcagtcaaaatttcgaatccaggctattgtttgcattgtttgcattcaatacaattggctcggtaggtttgtggatccttttctataacgggcaagcgcaaacttaaatcctacaaccccgctcattgccttcggcatccaggtatctccatgctcgacaattaatcaatcaatacatcgataccgggacaaataccatatgtacagtatgtgccgatgcggccggattcagccgccccctcgatcgagtttggcgtcccccccgtttgggtttggtccatcccaattcggtttggcgccccggactatcctcaaactggcatctgccatctccgaccgcctgccagcctcaccctttacactaggtatataacttccagtgcgtcgctcgatcatcctcctctctttgactgactgtactcttttctctcccgtcatgcccagccgcgaaatgataccgtaattttggatcgcacggcatccttccccctgcacctccctatttcagctgagtttctcgacatacctccaggggcttcaccagtccccttgtccgggatggcaacacaaagcccatggtttctgcgtttcccccctgaaatagtttcatccattgtgtcctttctgccaaataaagatgtcaagtccttgcgcttaacgtataaagccctcggcgagatttcaccattctcctcctcacgtgtgtttctttccgccaattcgttaaatatccaagtttttcgggctatagtagactatctaaagtttcgccacaaaatcagggagattatctaggataacgcacggtttatactcgcgccgttaatataggaaactatatacctaagcatcgaccccgaatacatagaaatcaactcgactaagggatatcctatctagtttatagaggaatacgaagagaaccgctataggatgaagtatcagaaatactgtaacgtagaccgacctaaccatattatacattagtaccagatagatacctaaatgccgttaaaagcctattagaagtattatcgctaactataggataatcagatatctataatcggatccaaagataataaaaaagcctttctttatagcctagagcgattcctatagcttaagagagtgaccgttacgcctacggctcacagctagctgtttactccgctatataagatacctataatccaagcatttctatatagattcaactatccgattccgcgaggatagtactatgatcccgttaattatcgggttatcgagccgctactatggttagaggcaaccgaggactataaggagctatagagaggggctcaaattgttcttcgccttttattataagctaagtataatatttccgagctaagcttcaactctaagcaactctataccagactaaacttttggattttcgaccggccctataaggaatacaatcaatttacggctatcataaaacgtctaggcttctggtatctttatctatctttactcactagtagtaactgggtaggattccaaagcggattattctatcaagctatgagcctggctaaggaattgacctatatccatttatcaactacattcaatgatagatctcattctttaataagtgttgaatttcgtacagcgtaatttaccactagaccataacaaaaaccaaggttcttgtttagggcctagaggggccatatcccattcttgacaataaggaatctacctattcccctaaaggaggttctgcctattaaggagtggccgaatctatctcacttagcgctctctcgtttcagcgttaatacatcggagttgatagatatactcaaattggcaccatcctcattacaatctcttgacttagaatttatcgagttcccctttgatgaattgtgtttaactggtctactggagaggatgtgagaggaactagattggactgagagagatcaaccgtcgaaaccgaccgttacgatcgcgatgggaggccatcgcatatggccgggggggttcatcaaactttcaaacgaggtagcaagctttatttatggctctggagaaaatcccttggatggaacagatacacgcagccccaaagacggatacgggacgaatcatgacctttttgaggcggagtacactcggcccaacgtcaatttccaggatcttaggaaactgggaatcatttgttaggaatgctacctagctgaccccgaacctgatgcattctgacgtgctcactgttgccctatgcagtttgtagacctttctgtgtggcattccttccctttctctttctcctctctggcagacagcttgccgcgtcggcgttttctttgtatgtctgcagagatgcttcttctgtgttctggtggatggattctggctggctttgtggtgtgaagctatatagacaagcttcagtacagtagctagtttcccatcttccatcaaacttcatctttctgcctctggctgatcactccattccctcgtagtcaggacctctcatcagagccgaaggtttgaatgtcttgcattgagttttaatcttggaaccttggaaggttattaatacccattcgtctattcaaaaaaaaacctatcaatatgtatcaagacatgtccaatctgttacatgctgcggtttctactcgtctatcaagaccgagctacttccctacatatatatactgagtacctggatagatctcttgcgatagttatggtatccatcagatattttcttgctagttaaccgactacaataggactgatagcatctgataaataatccagatggccttttatatctattctcattgtgcaatccaacaaaccaaacctcgtccacatcgaactttcacttccaccccaaaagcaacctttgctttgttactatatgtaccctcaaacatacaattattccacttcacttgggcgcgtaactcagtggtagagtgttcgctttgcatgcgaaaagtccggcgttcaatccgccgcccgtccatctatttttgtccgtttcattttttgctcgcaaagccggtgcgatcaggcgagcgccacctccattttgcctagagtatgattatgaccttgattattttacgtttttctaagctttaatttctatatatgtctcgttatatgacttgcttgaatttgggtgattggtggacttactccaaatataaattgtacatattcaacccctaaccttttaataaaatcaattttagaaatgaaagagaagatactttatagcgtctattggggacaatcttacaagagcaacgaagaagataattccgaggaagtaatgaagatgcgagaaatgacttactatagtttctgaactgtccttttattttggtctgtctcggtttttaatatctagagcatatctgctgcacttgttcctgagacggctattacctttgaccgacttttccatatataatatgtgtgagcagagtgttgtcattcaattgatgatattgtacctcactccataaagagcaaattggttgtgatatgtggtatcagactctaactactagctccccatcaaatccaggtgcctgagaaaagtaataaccgcgctgattactgaccaccatcttcttggtactctcctcaatgtaattgacattgaagtgcgtatgcccaaacgcccataattttacgagcggactcttccagacctcctgtctagagagattgctggcaaagcccgacgacagcgagctgtttacatgccttggatcaaccgcccgcggatcctgagtgactgggctatgatgtgtaaaaaccacgagcttgcgatgcggctcagagctagcgagatgagaaacctgtctatttaaccaccccaagtctgcatcatgggcagctgtgtggtcgtcaaccgtccagtcttttatgttgtaaaagtcattgagaccatagctgacgtgctccttatgggcctcgctcactcgcgaaaaaagtgtgcaccctaggacagtcaattctggtgagaggtcgtagcgagtctgatccaagaagacgaaagaacccatagtttccggatgtccatcttgttctgttgaacgccgacgatcaacagatgccgaaaattgatgaaggagtttcttcgtctcctcccaggttgaatcgtagggctcatggtttcccaacaggaagaaaacgatttggaattggcgcaactgggtctcgatgaatgtaatgaagcctgcgtcattgacaactcctatgtcacctaggagggcaagatatggcgccttcggggagatattgaacacatcataggcagacggattttctaaatgtaaatccgacaatatctgaaacgtggacatctggccgtacaccgaatgaggcaagttttgctgatgttatggatgaatgtctgggggggcgatagtcaccaaccaaccagatgcaatgccaaaagacccgccaagtgtggctaagttacatgtggcggtgcggatatacatagtgtggcgtaacacagcctccttccctcagttgtctaagcgcccagacatggatgatctcataggaacccctccttggctcttggccaagaaaatatatttatctccttccttcccctatttcaacgttcctgatttctttgttccgaggttgtccttagaggcgttcctgagcttctttctatcagcttatcaactattgtcacacgacgtcataaccgcgttatcaacaccttaatattgcgggcaatattgaaagacacaagatagcgaccaacacgatggcgagcgcagcacacgatcccagactgctatacagcgtcaataatatccgtgctttccacatccaagatggcgaagagcaggacctcacgccgtccggcgctcaaaccctatcactgctaatggtccccaccaacaccgccactgctggccctgggacagattggcctgaagattcaccggaagaggatttctaccttcacctatacatcccacctgagctcgatattgcgatcccggcgaccacacagatcttccaccaagctcccgacagttatctgattccccgctgggacatgggtcccgaagctggcgctttcattcgcatccagttccctagcattggaactggccctagcaatgtgtctcaggatgatattgatacctttgaatctatccttgcgcagtgtactgcattcctcgagcgcaccccgtacccgaaggctcaggactatactgcttacaacccggccgactacgcacccggcgagggttatgtcgggacacccgatacaaagcaaggagatgcacatggaagaattgtgcttgtggacgaagaaaacggcagtgtggtcggagagctaggagacggctacaatgtagtcgaggatgccgacgtgaagcctggctctaagagtaagtgttgaatcatggtcacctgtcaatcagcaactgactaatatcgaacaggaccggtaggaattgaacttcctgcagaaggcggaggcaatcaagtcagcgtcagcaatgtctccgaagaatacctgtcattggcccggcatccggcatataagaactcgacactcgttcagagttcggctacagcatctcgtctgatagtgactggatcaacatatctggcaagtgctattgcgagtggcgcggagaatttccaaaagaagacacagccgaaccccaagcctttgaaattctcagacgctacccacgcgcgcattcgcaaggtcggcaatttatccaacggagcagcagatatttctgctcgcacagtcggacaggtcggaagagttgcacagaacataggcgcgtcactggcacgcaagcaagaatctggccggaataaaggcttcgacaggcgcaacccaccaccagaatacaagcccggtgtgttgaacaaatcaatgatcgcatttacaaccctggccgacggtatcgagcagagtgcccgaaacatgctattctccggtgctggcgccgccagctccatgatcgaacaccgttacggaaatgaggcaggcgccgtgacaacccacctgacgggcggaatcaagaacgttggattggtttacatcgacgccaccggtgtcagtcgccgcgcgctattgaagtctgttgccaagggcatggtcgttggaaagatgcgcgatggtcaacaggttgtcgtcggcggtggcgacggcggccaggtaccggctaacgccgtgcagtctgcttcgggcccttctagcttgggtgcccgggaccctgttgtgcggcgtgcgtcgcctaccctcacaccgcctcctgcatatggtgcgtcggggacaaggtccctcaagggggggcccacgtcagggggtaagcggtaaaatctgggggctggcgctagttacagtgcttggaggagcgagatctcgtataggagatgtttgggttttttaatttttgtgatttggtatgacggacatgatttctctttttgcaagctcttgattgaggattgaggctggcagcttcttgattttcctattctacactttttgatacctatgtacttgatttcctctcattcttggctttccccttccgttttagtgctcagaccttgccgctccgcagccatcactggattgatcttgttttcggcagcaaacaaaagggcgaggcagctgtcgagtctgtcaacgtcttccaccatctctcatacaaaggtgctaaagacttagatgctatttatgacccaatggaacggttagccaccatcggcattattcannnnnnnnnnnnnnnnnnngcaaactcctcaccaaatcttccaccgacctcacgcccaggcctatatttagctaccaattacctttctctttcagttgatcggatcctgtagatgcatggttataatcagcttttcttgtggattatcgcttcttttcacttactgaatgtggcggatccatcgcggggaatattttgtattatcgtttcctggccaaaccctcgtcacgtgtcatgttgagttgtgatccatgtcaccatcctttaagaaagttcctcctctttgtttgctaaagtgaaaaaaaaatccaaactcctcttcctcctcctctagccttcatagcgacgatggctggtttttacttcacggaacaaaaattggaacaatgatcttatctcgtctatttctagttttctagactcaataggtatcccaaaccttctttggggtcaactatctacttactgtttatggagttcctacgattgtggatgtcagtattttatctcgattgaccggattaatctactaatattccaataggaagcagcttttgttattccggatgatcttacccaggtcgcattctcttcacttgagagtgctgggtttttaccctgtaacagcttaggctgtccgcacttagatacaaaccgagtgccaccggaatttaagcacctgcatattaatgatgaggttgcggtctcgctctatcggaaatctgatgtactatgggagtttgacttggagaaaaatccagatattatgattgcgtcggacgatcgactcccgtcggcatctccaggtcgtggccgaggacgcttcttatcgtgtccttgtaccgtgaaaatccattctgctgtgagatattgtgaggccctgattctattactttgccgtgactacgactcttcttatgagacttattggctagctattctgagctatatgttggagtatgttgacggtacggatatcttggatgaaaacaagttgcaagaaggttatagaaagttttaccatgccctcaaaactaggagatcaagagatgtatttaatactggatgagcttcgatttgcgttgattgaagagcgtcccctcccagtgatagattattaacaagaccgggctaataccccaagacacaacaagagacacaaataagacaccaaaaaagacaccaaagaagatatagcgcgttgtcctttttaaccttgccctcatgtagttattcaggacgtttgctgttgccttacgtaatataacttcaattctattggctagaaatgggacgcgccccaatatagtagcggccccacaaggtgcctacctagagagtatacaacagtaaagtcggggctttccactttctgtttctttcctctcatcatcactctccatctgacatccttttatcatggaatcacgtattgaagatggtcagccagatcctctgcatatcttttcggagtttgaagaccccactcgtcatagcctcatccagcagatcgttcaggatgacccaggattggccatgatcccgcagcagaatctctatgccttatggttcagtgatattagtactctacaggagaaggccaatgcgcaaaccaaagtcgcgaaaaagctccgcgcaagagacttgagggtgctctccaaccagtacgacgttgttggtatttgtgagtggatctacaagttatatctacaatattaaactaactattcttcaggggcttgtgaggggcagactactgcagccagcagagaagaaccccaaggttctgcgcctcggctgggtcttagtgaacgcggtcgatccagctcgcccaacactggctcctctagcaagccatctacgccagagcacgagaacacggtggatgtgagtttatcagaaatcacaaagaggaaatagtgctaatatggccttctagctcccatccgagagtgctaaccgtgatggttatcattgcgtagtgacgaagcgtggactaccattgattgagagtgcccatatcataccgaaaaagctcaacggtgctcggagtctgtacctcacgcaatatgagtgctgggcctggcttagtgctttctgggccgatgagaaagtcgacaggctgcaaagcctcttggtgtctgagggcataatggacacggagcgactttataaccagatcactctggatatccaggtgcagaaatattgggatcgtgcgatgtgtgcactccgccctatttgggtcagtgaagaccaaacagaaatgcaaatcgcgtttcattggctgcctcttaaagagagcctcccggggttggaaaatacttatcggggtgagatggtctcggttatggagaacccataccaggatccaaagtaccgacctcgcgagacccctgggaacaataacttcattttccatatggagacgggagttagaatcccctcgggatatgtcttcacggtcaagacggacaataagtatgaacggccactgccctccatggaacttttggaactgaggtggcatctgtctcgcattgcttgtatgcggggcagagacgaggacggagatggtgcttatgagtctgatggtggcttttccgtccgttcaggctctcgatcccctatctagaaagaagttatgctccactcgaacatatctttccgtccagccaccaagccaccgtcgccctcaaagctacagaatgtgtctttcgagggtgatttcagtcccttctccaggagtgatggatatatttcgcgctcttgacggtgtggctggctgtggccttgccttgctcctgacagcgttctctaggcttcctgtggctagcttctgtttcgcactcttgacggagtgactggtttcggtttgtcttgatactgatatgttagaataggatggacgtatgggttaggcctcatttcgcttaggtgaggataacaatgcatgttctgaatctgaccttcgaaaatatgtgaatttttcgtttgattcctatatgagtgacttccggtctttctgcgaccggggtcttccaggatgccttcgggtgttctggaagatccaacagccatgagcttggatctctgctgctgagatgcgaccgtttggatgtcagggtagacgaggcagatgtaaattgtgctgtctgtcttcgtacagatatccattaaaatgaatttccaaattagagagtaaattattattcgagaaatgactcccaacccaaaacggcaaaccaggtacgcggtttacttcataaacaactaacaaacccaagtcactcctataaccagaatttgtccaaaaagcatattcaattcttgtttccaacccgcttttgcattgttttgcattttcgggcttatggcgagggcgaggatagccattagacagggttgctcatatgcgttgccagctgccgctggacgatctatcggatattgattgggtgatggtatacaacgttgtagaggcaaaaactgccaacgcatcgattgacagttgtccacggcccaccgtggtggctttgtccaatgagggcgatcagcactcacatgagtatcaagtcacaaacgcttgacatttacatctggagtattggtgatccgggggctgtcagaaaggtagaaaagcagtggaggatttagtggattgagcatcaattactccgtactgcatgcagatatgtactccgtatattgatggagacagtgggtaagtggatagcgtaaggtttagtcttgcaggccggactatccaggcaccgcatcgagtggtgtgcactccattttccggaccgagatttcaggacgtcaaggttgcagttggatataaaactcgagcagatcgggatccgaccatggttcttgccatgcttaccgtggttaggtggttccagggttcgggctatggcccctcttcaatctgcgtattacccccatacggagtccttcgtagcttcaaagcgttaaagcccgaagcgagagtccactatggtgagcgctaattgtcaggatcaagctagggaggtgaactactgcacgctattcttatatctaatctctggatctttgagtctgggattgatcaagtcaacaacattgagtttattaaaaatataattaatctcgtagtaacattgatttaattcagatgcgtacctatgtaattaggctggaccaatgaagaaggagaaaaaaaccgagatctgggcttccgttctgagagaggctaataatgacgatcgtcccaagtgtccactctatgaggattcgaaacagccggtgcaaccccctatttattattatttgcatctttcgcttgaaaccgagcaatttagcgcccggtcatgctactattatttcgggcttatccacagaggacgtcgtaacgccatacacttctctcccttctttggcacatgcgaggatttctcgggactcgagccctttttggcaaaggttactggcgcaagggattcgagatcaatatatgggcaattaatctatccactcctcatacaggatttagtttgtctttgttgtcctgatgtatcataacagtccttggcctatgtaccgactcggtatatgtagtatagcttctctattccagatcgtagcaagatacaacacgatagtcccatccatagtataatatcaagtagctcgtagacttccatgtaaacatccccgtatcatatcagtcaaaccctcatccaaggctcaagagccaaagacccgcctcccccagactaacagaaactaccagtcgtatcttacctcctcttttttccttcttcaccttctcatccggcctctccctctaccctttgggcctttttttttttcttttggtctgtgttttcttgtttctttgattctgttctttgggggtctcttctgccccctttttcgactcggatcccccgaccggtgtttcccgtctttttcctcccctcgcgacccctgtccgcgcccctcagtaatcctattttcgacaatgttcatctgttgtcgcaattgaatcagagttctgttgatcaggtccgcaatcgcgtccgagacatttgttaccgcgtttgctcgattccttggacaacgtgcgaccgcaaaccccaagtcgtgggtctggaggggaactcttgaagtactgcagcgcaggtatctttagctttcctttcgtttttcgagaaacttgttgtttttcgacgcgtcttgacacctgaacaagctcgcgacctggtgtcctcggtgatattcaaccatcatctaacggtttttgcgcgattggtcgtaagctagtccccccccattcctccgatcggatctcctgctgtcagttgtccacccccccattcttgggtgaaaaggcacatttttggcgattatcgataagcatctggggaaatattcaagctgacccatggcccaatgtctacagatcgcgctttgcagagtcatttggcgagtgcgaccggtcgccccaacctcccgacttttgccaaacacccccgggcattgtgttccctcgcgccaattgtgccaatcgcaattgataccagaatcgtgtcaacgagtgcccgcagaagctgcctcggaccgtcacacagcaagtctcgtaaggctttgcgcatctactagacaaaggtatgctatcggccgtgatgcatattgcctcacagcgcgtacccgtccgccaaaccattcaattcgataaataggttgctaatctccaaaagccgtttctgaggccggtcccgaacagctttttccggctatgagcacttctcatcagcaggccgtgccactccccgctcatgcctctgcagtatcgaccacatcatctccagcccagaagaatgcgcgcgcaccctatcccgacatgctaggttcaccgccggttcctcccccgaggacctcttccagtcgccgtactcaaaatgaaacctctacagagaaaacgagtagctctcgacaaggcaagagcaggtccgatcgaaaagacacccgtgatcgcacgcgcgatagcacgcgcgatgaccgaaatggcagatcacggaggcagcctgaggacacatctcgtgaagtacaatcaaggacggattcagaagtggacatccctggccgtgtaaaagaaccaagttcggaggccaagtctgtgctacctagtgactatggtatggacgagagagaacgacccgccacagaaaatgcctctacgggtagcgtcgaagaggaggctcgtgggcctcgaagtcggcatgattacaataatgggaacgttgtcaaacgcaaggaaaccaccttcggctcgtacattctcggacaaaccctcggcgagggagagtttggaaaggtcaagctgggatggaagcgcgatggcactctccaggtagcaatcaagctcatccgaagagacacactggggaccaaccccagccgattaccgaaaatctaccgtgaaatcgccattctgcgtgagctggcgcaccccaacattgtgcgcctccacgagatggtggaaactgaccgtcacattggtatcatcatggaatacgcgtcgggaggtgaactgtttgattacatcttaaataatcgatatctcaaggataattctgcacgccggctgtttgctcagctggtgtccggtgttggttatctgcacaagaagggtattgtgcaccgtgatctcaagttggagaacttgctactcgatcggaatcgcaacatcatcattactgactttggattcgccaacaccttcgacccggtggatcctttagacgaggaaatggagtacaacttgaccaacaaagaatacgtcaaacggaagcgactagacaagattggtccaaatgggctaaggcgaggcgatcttatgcagaccagctgtggtagtccctgctatgcagcccccgagcttgtcgtgagcgattctttatacacaggccggaaggtggatgtgtggagctgtggtgtaattttggtaagttttcctacagacagaatccgactcaactaacttgttacagtatgccatgctggcgggatacctacccttcgatgacgacccagcaaacccagatggcgacaacattaatctcctttacaaatatatcgtcactactcctctcacattcccggaatacgtcacgccacatgcgcgcgatttattgagacggatactggttcctgatccccggaaacgtgcagacctgttcgaggttgcccgtcacagctggctcagcgagttctcgaatgttgtgtctcatatcacaagtagtacgacaaacgttgtggacattgcgaatacaacgatcccatctggtaaggacttgctctctgcgggtggtcaagattcgaattgctcacataagtctatagaaacccaaaaggaagcaccgcctcttgtccgtagtgcttcagtgcgcgaaccaccgaagacacatcagcacgcccctgctgttggtggcttgaaccatcatgctggagatgtttctcaagacccgccgtccgaaaagtctagaaccccccgcgatgccaagcggagaacggtccaagtcgaatacgttgctcctcaatcacaaacgacccgaggagaacctccggtggaaacgtctgcatcacgaagccgagtcccggccccatctgaggcccagatcgcagcttcagcgcaacaacccacagagcctgcaactgcaccactcaacctgaacaagccacttccagggcacttgccgcggtcggcctcggaccacgcagccatgacggggtcgcagacgagtgggatgtcgcaagggcatcggccagccactggtacttctatgagctcctttggaaacactggtcgtttgccttctcgcggctcctatggacagccggtggctcctactgttaccgcaactaacacagaaggccgcctagcacagcccaagagcaggcaatttgctcttccacaggatcctgcacagggatcgagcacatctatccgtcgtgcaagcacccagaaccagcaattgcctgccacctttaacactactccccgacaagagccgccaaaaggccacaagaggtccaatactgtttccagcctgggcgagaaactgttcggtcgttctggttcaatattgggtggtcgttcgcagtctaataccactcgtacaaagcaagacaagcgttatcctcctgtcagcatgaaggagcctctaccgagggaaaactccagagtgtctgtggattcccgccgctcgatgcaatacccccataaccgcaagacaagcgagtctggcgcggaaaaccgtcctcgtcgattctcattactcccgcaatccttctcatttcgcggtttctctaatacccgggctccgactcccgaagaaccctcgcagatccctcgtcccgtggacccccgtgtcccgcaacgccctacctcgggccctgccggcccctcgcagggtcgctctcgggcgacaagctatggcacgcaagaagctatggggatagttgacgagggacccggcgaagatgttcataccgaacctgagccgcttagctatgaggcccagattgatcaacagtttgcagacctgggatctcaatttgactaccaaagtggttcctttggagtcccctcgcctgaggaagtctaccagaactctgcagaccgcattgatcaacaaaatcactcatctaaaccaaactactacgatgattacaatggcccatatgacagcgcgcctaggcagtcgacgcaggttggccggtcaggccgtgggccgggtgttttgcagaaaagccaccgcaaattcgcggacgcctacgaatatgagcgcgacgggtctcaccattccggcagctcgggggctgcacgcaaagtcatggacttcttccgaagacgcgccaagtcccgcggcggcgatgaccgttgattttcggtttagccaatagataaaaagcaatattccatctcaaacggactgaccgcggagattggaccgatcaagcactcttgcggtttgagctttgatcttagaagccgattcaaaccctatcattctgatgcttcttttgagttgcttgaaagagcagcgaggttgtttggataccccgtgataccctgcttttgttcccttcttatgcatggagcgattcctcttcatccgtcgggtgtttgattaattatctagcattttctttatttcctttgtctagctacattttccttgctcctaatgtttcgcttttgttcgctgttccccccgttttacctcaatatgtgatttgcattccccttctactgttactattatctctggctgtaaagtgagacctcatccgtgttcttgttcagaacattttattattcttttgaaccttttttttcgcttctcattgtcccctcttagcttttatttgttcctctacgagaggctctgtccacgataattcaattgtgacattatttccattcttctgtctatgtctatgtaccttaatgtgtggctttgtcctttaaggtggatgtttctggagagttattcaggccttcctattctattgctactctgttactctattactagactacaacaaatgtggtcagtacactgttacttgggaagctccaatatacctcattatcaagcggaagactctatatctcccttcagctgcttgtagttgatgtagtgtaacatgattaacatcagaatacctattccagggtaggtactttcaaccgctcaaccttcaccagatcagcctccctattcaagctctcaatctcagccgtagtaaaaggaataccctccgccaaccgtttctcctcagtaatcatctcaatctccccagggaagtaaatccgatccacaccatccatcctctccgacccaacaacccgccgataaagataatccatcctccccttaaactcctcaatagtcataaacaaatccggcttaacagccaccaaaaaatgccccacatcagccggcctcgacgggtcatacgggttagtaacatgacccgcaaaagccgacccagaaagcaccccggagaaaacatccatcataaccgccagcgccgaccccttcggcccccccatcggcaacataacaccccccaaagcctccgccggatcatccgtcctagccccatccttatccagcgcccaatccgtcggaatcctctccccccgccgcaacgccttataaaccttcccccgcgccgcaaccgaaggcgccatatctagtataaacggtctgttgccctgccccgccggcgccccacacgcaatcggcgacacacccatcagcttctcccgcccaccccacaccggcagcgcgggcgagctattcgtaaacacgagcgacatcatgtccgcgtccagcgcttgctgcaccagccacgcagacatgccgaagtggttcgagtgcttgacggagaccattccgatgccgaaggtctgcgccattgagatggcgagtttcattccttcgtgcgcggcgacgaagccgaagccgttgtgcgcgtctacttgcgctgctgctggtgttatttgctggattgtgggtgttgcggttgggtctagggctttctgccggattcgttctatgtaggatgggatgcggttgctgccgtgtgtgtctacgccgcggaggtcggcggataggaggcatttggagattatttcggcgtgcggtgggggggtgttgtttgcgatgaggatttgtttgatgaaggtttggagggctggggggttgatgttgtgggtttggtggggttcgttgggttggtcggacattttggatttggattgggtgggtttgatgtgggattttgttgttttagaagctgggttgggtgtgggttgtcctgtagagattcttttatagacgcggggacggatgtgttgcgaaatgcggggccccacgggtttatgaggggtatagccctatttcggagtacttccgaggtttggtgggtatattctataacgaatatatggggtttgagagcttgatattgtcgaacctttcaaaaacaaaggatgttgcgcctgcctacgagatcattacggatatctattgatcctacgacatacacagtactccatactcacggtaaggtgcatggtataagccaataagaattaagtcaaggaatggccgctatgcacatccaacaagggcggtcggtgtaggaaccaacgccaatctcctcaatgcttaccccctgaatacattcaagatcagtaccccttccagcattgaattcccgtccaaatgagtgttccatcgctgcctgatgatctatcagattcagacttcggcgacgttgtgagcaccgaaaacgacgagcttgatctcgaagcaatctcagagccctggcataagtacgatataaaagaaacaccaaacgttttttaccctgtttatctcggagaagtcctcaatgagagatgtctggtcgaacataaaatcggtcatggcggcggctctactgtctagatggcccatgacctctatgataagagggacgtggccctcaaaatcatgtctttaggggactggggggagaacgaataccgcatgcagaacgaaatccttcaaaacgtgcatgatacttcccacctagtgatgtatctagggacttttctcatccctggaagcggtcatagggttctagtattccctttaatgggtccatgcattgtccctattgaaatggaaaaaatgccaatggccagccgcatgttcgctgctcgccaattgttagaagccttggaaagtctacataaagaagaattgtgcaccgtgggaagtcgacctactatattcattttccgttctaatgaacaatttatagatttaaatgagaggaactgtatgtgggggatgcgtcctctccatcatctcaataggaatgcgaaatacgaggcactcggtcggccactaaagctagctataccatatgtcgaactttgcaagaaggggtagtttgctcggccagttaaggtccccgagaatttacgcacagaggaattctttctcggtgactttggcctagcgaaaaagcttaccgatagcgtgactcaacgaggctatcccccttcgaaatattgttcccctgaacgtcttcacggggaagcgccaagtctgaactcaagtggattcgttaggagtttaggtctactacctgaaaagtggaagggtctttaccctggaggactcgattattggtatgaccaatcgcaaacgcctgatccggatcttgatgttgcctctagaattgcatactttcgtcccgatgctgatccgatcgagcgaaaccatgtggcctctatcatgtccaaagtgctctaatactgtccagagaaacgtccgagtgcaacacagcttttacaggatccatcattcagggccattatggagagatacggttgttgctcctcattatttcgtttcttattcgtcctgtttcctatgctgtaatattatttcttcatgtttagtgctggaacaactgcgaagatcgcatgagtcgcttgaagaataaagtgcatccattcagcttaactatagagtagatgttggagtaattcggttaagtactccgtatattataccgatatgccgaccaccgagatctccatattagggctatatgcaatgacagagaggatagtacagtccaaaatctgatttacgaggattaccatcttcgtccaattacatctcttaatgaacataacttttcggagcgagacaaagttgtcgattgctattgactttgtactgcgctatgacatcatactcggctgtgggcggcgattgccgtgtactcggcaaacatcccaccatgcaaattcacccgtttgccgacgcactatcgaaatcgttaaatatgcaacctagggcgaatgctgtatgcacccgatgccacagtagcaaggtatgttgttcttcatgaatagctcctatcaatactgatagcgatgaagatccgttgcgacctagaaggccggcgaagtggtaaatgtagccgttgcgagcgtataggctatacgtgtcagtaagactgcgtaatgatatatatctcccgaggcctataggctgacgttatagacctcacattggaaagcgaaggagagccctccacgcttcgctctactcgtcacatacaagtatcccgtcgccaagccgagcagtccctgtgacacaggagagcacagcacaggaagcaccctctccctttcgtcatcttggccgtcgggatataacatgtgtgggacctggggttgtcaacggctcgcaacagccgaattccatcgatggcagtcagctcatcctagacataagccaagcttgtcgtcttccatcccccatcatcgcccaagcgcttaccgatttctatttccgtgagctgttctacttcgtcccagttttagatcgtgggcagtccgagatagaaacctctactttgttacagcaatgcctgtgtttcgcgggaagtaccatgcgtcaaacggcagggccagccgagtggaccacgtttgccatttacgggcggatcagaacattgctctttctgaaccacgatccagctccattgaatatgctcagcgctctttgcatcctcagcacctggttcccatattctcctgatgcgatagtgctagacaacccgtggcaatgggctggtatggcaatccgactcgcgattcagttgcacttgcacgagaatgagacttacagcagattagaggattcaggaagagcgcgcaggatgtggtggtatctctttatcaacgatacattgcagacggcctgctgtgggcgtcctggaatgtttcccctggaaacctctgtgccactgcctgttcccagtgacttcaaacatgtcgatctcggatcacgcgttttctgtcagttaacagttctctgtacaaaactcaggaaggttgttgacctggccagagttgacaaggcctcatcagagcaggtgtatctgaacctggatggcctgagagtgtggagagaacagctgcccctcgaaagccaattgttcgacgtcgaaactaggcaaccatacaatcgcgctgtcgctgagctccatatattttacctagtgactgtcattttgacatgcttccttggccgccgggataacccgtcattgttcaaatacgcttcaatggctgcttcatcttgtatttcgcggctatacgaggagattctctatcacgaggatgtccaatacctactggcaatgcatacttgggctaacctcgtcgccggaatcccgcgagctttcggagacagcgatgtattgaatcctgaccgcgacgaggagctcagaatcagcaaacaggtgctggaaattatgagggagaagcatacctccgctacttttgtactcaacaaaatcaacggtctcaacaatatgcgcgcagattcggttcccgctcaagccgataacacgtgcggtgctcttccggtgtctgggcaaattcaactagctcagttgttccctttcccctcgaggttttgccctatgcttaggattctaagaactgcggaagctagcgaaaatcaaccaccggacgcgcttctcactttgcctgaagatagcaatgattggccgatggattggtcttcctttttatttgacggtccaatgagcttctaaaatacggaaatatgatattgctgtgaatactggctttaatagaaagttcatagtactaggcttactagctagaccgtagagttagattctagtgtatctattctctatttgcacattggtaaagcattcaggaaattatcgctggtatacaaacctagtaggcaaataataaatctcactattctatagaatcagtataaaggttagggattgcccccatcaaagaaacacggtctattaattcccccgacggatgaactcgatatttggtgtctcggcaaagttacggctctcgggtttgccgcttcggccattttgtgtcgcatattttcttctaggacttttatataaattgaacataagattctcatctcaaataattcctccagatcactcattagtaaagaacaaatatactatggcatccaatccgaacaccaccggaggcgtgcaactgacgttcctcacaacgggaacggtacgcattagaccctcaatgcgctcgcaaccattgagcaaaatcccgattcttcgacgtctccgagcaatttgcgacagaacatggactgagccattgccagtcggggtattcctcattcgccaccccgaaggtctcttcctcatggacaccgggcaatctccatgctgcaacgacgccggatatctcccacgactggctattttgaacggcttcctaagcgaattcatcatcgagcaccaagacggagtccttgagcaacttcacaagctcggaatcaaggcgactgacctcaaagccgtgattctgacccacctgcacaacgaccacgcgggcggattagaggatctggttgcggaggcacctgacctacctatctacatcagccgtgagcactggaatgcttttggggaacatcctctctttgcaagcatggagggagccacacccaatcattggccaaaggggttctcgccgaagattgtggacctgcaggacagaccacttggaccctggaagcagtcttatcctgtgacagaggatggtagaattgccatcgttgatacgtcgggtcatgttcctgggcatattagtctggtgatttacggcgacggggaagatggacagagtcaggttacatacttcctccctggagacgcaacatatggcttggaccttttggacaaggagcagcccgatgggattaatgacgaccctatgcgtgcttacgaaacgctgaagactatcaagcagtttgctaaggagactgatgtggttgtcttgcctagtcatgacatcaacacacctcgcttgcttgctgagcgagtagtctaccggcctcttgagaaagagtgatcgtgtttcaataccatgtacaatattgtgttatttgagggaggaagctatgtactaatatcggactaatgtatctgaaagggaagaaattggaatattttcgcttttgtaacgaagtagcctgcataatatccgactgcatactgctctatctgtatgaatcctgaaaatctgaagccaccagctccgccgattatggaaacaacagttgccttctccacagggtctactcttagtgcggaaagaaacccgaactcggaccgagctcactgtggcaaagccgataccgactgccgacttccatctagcggcgcaaagccagtggcgaaatcatggccgaaagaacatgagccgctcgccacccggttttcggtaagaacccgtggaaatcaataattaagcataacctgaaacaataggagattagaatagccggagatttaacatattcagaatccctataacgtagcatataacgcttcacaacccaaaattccaccgtgacataaaagctcattgtaatagtcagagcgacaggcgggcaagggggatcagttgtatcgtcatttctgaaagccggaggatggaatatccgtagcctgacccataataccgagagcgacaaggcgaaggccctcgtcgtaaagggattcgagatagtgtaggcggatatctgagatctagcgagtcttgaaacagcctttcatggtacctgtgcgatatttgccacgacggactactaggagaacttctggacgaaattctggtccatagagatcgggtatacgtaaggtaaagtagttagcaacatgcaagagaagagaaagatgatatgaaggattggcaaaactaggtgagaggaaaaatatatatcgaaggggatggcagccatcaatcaagtcatgtagctggaccagttctaagacccttctcgacgacctcaatatctcggagcagttcctccgcggattcgtattccttcaaccaacacttccaagtaatagcactgcacgcatgtgaatcccgtgggaactgctgcttttcaaacctctgttcataccacccatcttccccatcgacaatgtcaggaaacaccgaataccccatcatgatcaagtagatagtacaacccagcgcaaagagatctgttttgacatccgcatcaaaaggatcggcccgagggcaataggatctgacgggctccccgcttccatcaagcagtactgttccatcgctcgatagttgtttcccttggaaatccgacagcttgatatgaagatcctcatcgaggagaatatttccaggccggatattgcagtgaatgatgccctgagcatggatccatgcaactgcctcggtagcctctcgacaccaggataactgctgctggatcgaagggggggtgttgtctgattcgaggagatagtagcctaaggttccgtttacagctcgctcgaggtagagccccttgtcggagaagcccctgaatcctatgatcgttcatgggacccgacaatttcgaaaagctttttctcgagatttcgagccgactcatgtctccgccaggggcgagaggaagtttcatgaccgtcaaatcatccacttctccaatgaacgcactgcttcccgaggcgatgaccttcttcacccctggggggcagtaatgtctgtgtataataacttctgtgtcgtctaacatggcgagtcgagggaagaaaaatgttatatggaaaaggtttggtaagctcagtatttggggtgatagaattgcgagttgaaagaaaccctacaatgaacagttaaggcgcgtgatgttgctcgggcgggggatggtgcaccggacaatcgaaatgattggctggtattgccagcagaaagttggcttgatcgagtaactagatttcaaggtgtattagcttcttaataatggtttatctcctataatagttaactagataaacaatcggggtcgattctcttctagtgatatgatcacaaaacaaactaaatactgtagtagtacatctatgcgtggacagttaaaagggtatagaaagaaggaaacagtagtagcctctacgtattcgctacacattagatgaaactacatattaggggaattgacgaggcattaaatacattgggatagctaaagtggtaaactgcattcaccgatggcgagatgaattacgcagttgacagcaccatacatattggactcagtacaaaacaatttacctcagctatagtccacgcgcagtacctaatcctcacaccaccagccgaacgaagtccatcccaaaaaatcttcacagttcgtggacatgatcacgtccggccatggccttcctttcatctaagaaccgtcagtcattcaggcacttcgaattttgatctgtttagcatacgtacatatcaacgactttctctaacactttgggcatatatggcccggaaccctgacaaccgaggttgccaagtatacatccttgtatcccgtgcagttgctaccaccgggctgggggcactggaccattgcaatctcttctttttcatgctttggggtagcagtacagttttgatactttctgcgggcaatacgtcgttcgcatccgcaagccatgatgatattcagaccgtaagttgttcttgaccgaaaggcaatagaagttaaagtgtagagccagtggccagaggataattggatgatagtagagcgatagttgagcaaaagctttgtgattctcatgttgacatcggaattatgatgcctttatatattcatctcgcaaagtctccctcgagctgaggggtcagtgcagcttatggtcaacaccattatctagcttgatgaatgaatcacgaccatgtccgcgatgtattgtcttctcccccgcatgatcatattggctatctccctagtgtcatgtaaagtgttgactatgcatctctctcgtcatctagaccggatatagcctctgatacgcctcctccaattacctttcggtattcgacgagctaaagatctgatcatgtacattattggctatgactaagactacgatagaaaaccgaattacagacttttccagttgaattcaacccattccaggaatctccaaatctttccatctagttttattctctttatccggactacagtaacatataggaaagtagaatgattctaagtctaacactgtccgtccacttctctgagaggaacgccttatcagtgctccaagggactctagttctcataaaactgttctcgagagttcttcagttatccattgccccgtatattggtgaatcaacatccttctgcttctctcctttttctacgccgagtcgtatggcctctaagattggataaaccgcatctactccaacataccaaaatattcaacattaagtcctaacatttgactgcgtagacttggttggtcttggttggaattgttttccatatccaattcgtagcagtgccagcctgggggagaaaagtatgtccgctatcctcgccccaccattttgtgcccctcttcgtgagaggaaacagttactaccatcttttacccttcaattcttgagattacgatgcgagatgccttttcatcatttgacagatgctatgcattgatacccgattgacccgactatttgtgattttgaagacttgattgttcctgcctcagaccatacgacgacacacagcccattgcttctcatcaaccaaccgacacatcacaagaggagaaaaaaccaggatatacaaaagctggttacaaggtcctacatcttgcgaactaaaataacacgaggcgaacttttcgccgcggttgtgtacttcagtataatcaatcttatcattcaaagtcagtttctctttagaaaacccaactgttactggaggaattccattattgctcataattggccccgagctaacgtgccacttcagccatgatcgaccaggtgcgcaagtacaagcttgatcctattccacgaggaaatcttacaggggtagtgaaccgaaatgtatgtactctagagttggagactggataatgctaattatttgcagctaaaccgtgacgattgtgaaaatatagaatggactgcccttccgaaagcaacccgaatgaagcctcctccgaaagccatcgccgttattgttgatgtcatagaaagccaaggtgccatccacatcaccgacgatgacggatcatacattgatatggtaggaactgaatttgctggccatttggtgcttgtcccgtgggataaaagctggtttttgagggcatctggatcgattgaagtgggatatgttatcgtttaggagaggacatgatataaatcactcgataactctttgacgatttatgattaaggaatctgtcaactccctagatattgggattgtgacgaaggacgattgatatctgttgtaggggtcggttaggcgcattatgccggtgatttggcctggcatcgccgcgatttttttcagatcgtccatggagacctcataaacatcaccatgaacagaggtaagggtggcgtctttccttggtcagccttagtcacagaggagtaaagatcgtttacctcgagtcactccgtcagctagcttctcaaagacgtcgagctccaattcattccatttttcggacagcttagaaggcaaatatacgcgctcctcatctctcatgttcgcaatggcagaaggtcccaatccagccgcacaaagaacaacccctgtgtcgccgtgcttcttccttatgttccgttgagtctccagatatgttgttctttacttagcacctttcgcatccgttgaaggtcgtccatttgttaggagctgaaaagcatcgtcaactcgcttttgttcagagtctttcagataggtacggtgatgcgttaactttgagaacttcaagagcttcgccacggcctcgtctgcagttaggctttgcgaaggcatctatctgctcttcgttcattaagagataatgaaaatgattatcactggagtatatactgtatgtgggaccaagcttagatgtaatcagaaagaggcgagatctctctagaacaagtgaaaaatgcttgaaggttgttgaaatccgttggcaacagctggaaacagttgtaaagttttggccctgattccagccatgcagaaatccatggaaacttatggaaatgtcgaatcgtcaagaagaccaatcatagtttgaaatgatgaaacaaggaggcagacatggtgcatgaagcctcaaagtatacgacttcagcgatacgcgcggggtaatgagaatatctgatctgaattacctggaactataatggaaattatgattcacagaagacattgctatcgcaagtttctactttatttctttagttgtctcttccaaacaaccccagggccaaacgaatccctccgtccctgtatgcaatcgatggccgccatctgtaatattttaggagctagaaatctgcgattgagcatgtatcaacataatgcttgcgcattccgtcacgcattaacatatagcagacagaagcagatttgtgtgattggcgaggaaagagaaatgttcgttgtttcccagtctatgcgcctgacaaggaaggaaagtcaccttcagcgtgttcacgagcattttgagcattacaaaatctctataaggggactgagactgatagcttataactaaaacggtatgcaataatgttaagattacattttattactgaagttatatagttaggtgtaactagtgaagaggggacccctaaggggcaccgacagccctgtctgcgaaacaggtatgagagcagagtcgtcactgggagtagtagggtgctagagnnnnnnnnnnnnnnnnnnnnttagtttaattaatttaatggcgttttggttgaaatatatgccttagaaaactatactcttgggtggggtggcgactcgtttacagtggcgactcgtttaccgattatgttaatgtattttaccaccgagccgccaccaccaccgagccgccacctcaccctaatatattgaattgaaatgtatatatctctaccaaaacaccattaaattgaatcaactaacaactggtctatctggatatgtttctcttctatgccctggcaatctgtatattccacacccccgggggggccgtgtatgtggctgaatagttgattctctaggtatgctggggccggggggaggtactttaattacttcttgttgctgtataattaatgcagaggcttcttgaactgaaaggccttcttcggtgggtatttgcctctgggatctagtatgcttttgcttctgcttctcgttggcggtgtgtaattccttgttttctttggcgagtaggatagtaccttgtattataagacggaagccttttataagctggtttaatgtacgatctgacgggctaggtaggcttcgagatcttatataaagtagagctttaattaataaagcctgccgatatagatctttctctgtaactagtgtttttggtataaaatttcgacttgattcgctttcccggctaggggggggggttagggttcgaagctgaatattaagctttgaaatcactctttctaggttaaaagggactaaaccagctattctaaagctattcttaattgtctccgatttaaaagctttaattcgtataagagggtatactttaaggaagtcaagtttattaatataattaaacccgttctgtatcttgattttaactatccgaccgtaggtatattttaataccgcaaaataactaatatctagaggttataaaagataagataaatgcgctggtatatagattagtatcaccttattttacttataaatttcgttaaatttaggtattaaataacttctgtggctattaagaattaaaagccggtataccccctttatacgcgaagtactaggaataaagagcttcttaagctaacgaagtctaatcttatcagaggtctagctattaggactaactttaaagcgctaatcctctaggaggctgttaaactaagatttaataaagactttgcctttaaaaatcatatatagaggaagtgcctacctagaagtattcgtacattcaattgtagttacctactcgcgatttctaggttataaaagtgatctctaaccgtagtatttacttctagttataacctttactgttatagtcaatcctatagtaaaacctatcttattaaagttataaatgttatctagatcaattctatactaaagaatagttttttgaactagattaaactactccccaatgattttagggtcttcgcatttcgtatacttgtaattatactgtttcgagaattaggaggagaggagaggatatcgttttacaaatttcgtaacccaattttagctaactgaaagaactggggtagttccacacttttgaagaagaaggtccgccatttcttatactatagagggcctaggggctgctctacgtagatctatagagagaatccattttttaagagattcttccttagtctctgttaatttatatgaatttgcgcgtgtaatgcttcgttcggtatggccgtcaagacgattgtatagggtagaacggggtatattgaaagtacaggcagtggcagtaatagtacgaatttcttgcttcttaatagcctaaatagctaataaaagcctaccctcttgctctattgaatttttagagctttaggagcgaattggtggcatagtgggtggttgaagaagaagggattaaattaattgacgcgttttgggtgaggtggcggctcggtggtggtggcggctcggtggtgaaatacgttaacgtaattcacatacgagccgccactacatacgacccgccatccnnnnnnnnnnnnnnnnnnnnnnnnnnnnnnnnnnnnnnnnnnnnnnnnnnnnnnnnnnnnnnnnnnnnnnnnnnnnnnnnnnnnnnnnnnnnnnnnnnnnnnnnnnnnnnnnnnnnnnnnnnnnnnnnnnnnnnnnnnnnnnnnnnnnnnnnnnnnnnnnnnnnnnnnnnnnnnnnnnnnnnnnnnnnnnnnnnnnnnnnnnnnnnnnnnnnnnnnnnnnnnnnnnnnnnnnnnnnnnnnnnnnnnnnnnnnnnnnnnnnnnnnnnnnnnnnnnnnnnnnnnnnnnnnnnnnnnnnnnnnnnnnnnnnnnnnnnnnnnnnnnnnnnnnnnnnnnnnnnnnnnnnnnnnnnnnnnnnnnnnnnnnnnnnnnnnnnnnnnnnnnnnnnnnnnnnnnnnnnnnnnnnnnnnnnnnnnnnnnnnnnnnnnnnnnnnnnnnnnnnnnnnnnnnnnnnnnnnnnnnnnnnnnnnnnnnnnnnnnnnnnnnnnnnnnnnnnnnnnnnnnnnnnnnnnnnnnnnnnnnnnnnnnnnnnnnnnnnnnnnnnnnnnnnnnnnnnnnnnnnnnnnnnnnnnnnnnnnnnnnnnnnnnnnnnnnnnnnnnnnnnnnnnnnnnnnnnnnnnnnnnnnnnnnnnnnnnnnnnnnnnnnnnnnnnnnnnnnnnnnnnnnnnnnnnnnnnnnnnnnnnnnnnnnnnnnnnnnnnnnnnnnnnnnnnnnnnnnnnnnnnnnnnnnnnnnnnnnnnnnnnnnnnnnnnnnnnnnnnnnnnnnnnnnnnnnnnnnnnnnnnnnnnnnnnnnnnnnnnnnnnnnnnnnnnnnnnnnnnnnnnnnnnnnnnnnnnnnnnnnnnnnnnnnnnnnnnnnnnnnnnnnnnnnnnnnnnnnnnnnnnnnnnnnnnnnnnnnnnnnnnnnnnnnnnnnnnnnnnnnnnnnnnnnnnnnnnnnnnnnnnnnnnnnnnnnnnnnnnnnnnnnnnnnnnnnnnnnnnnnnnnnnnnnnnnnnnnnnnnnnnnnnnnnnnnnnnnnnnnnnnnnnnnnnnnnnnnnnnnnnnnnnnnnnnnnnnnnnnnnnnnnnnnnnnnnnnnnnnnnnnnnnnnnnnnnnnnnnnnnnnnnnnnnnnnnnnnnnnnnnnnnnnnnnnnnnnnnnnnnnnnnnnnnnnnnnnnnnnnnnnnnnnnnnnnnnnnnnnnnnnnnnnnnnnnnnnnnnnnnnnnnnnnnnnnnnnnnnnnnnnnnnnnnnnnnnnnnnnnnnnnnnnnnnnnnnnnnnnnnnnnnnnnnnnnnnnnnnnnnnnnnnnnnnnnnnnnnnnnnnnnnnnnnnnnnnnnnnnnnnnnnnnnnnnnnnnnnnnnnnnnnnnnnnnnnnnnnnnnnnnnnnnnnnnnnnnnnnnnnnnnnnnnnnnnnnnnnnnnnnnnnnnnnnnnnnnnnnnnnnnnnnnnnnnnnnnnnnnnnnnnnnnnnnnnnnnnnnnnnnnnnnnnnnnnnnnnnnnnnnnnnnnnnnnnnnnnnnnnnnnnnnnnnnnnnnnnnnnnnnnnnnnnnnnnnnnnnnnnnnnnnnnnnnnnnnnnnnnnnnnnnnnnnnnnnnnnnnnnnnnnnnnnnnnnnnnnnnnnnnnnnnnnnnnnnnnnnnnnnnnnnnnnnnnnnnnnnnnnnnnnnnnnnnnnnnnnnnnnnnnnnnnnnnnnnnnnnnnnnnnnnnnnnnnnnnnnnnnnnnnnnnnnnnnnnnnnnnnnnnnnnnnnnnnnnnnnnnnnnnnnnnnnnnnnnnnnnnnnnnnnnnnnnnnnnnnnnnnnnnnnnnnnnnnnnnnnnnnnnnnnnnnnnnnnnnnnnnnnnnnnnnnnnnnnnnnnnnnnnnnnnnnnnnnnnnnnnnnnnnnnnnnnnnnnnnnnnnnnnnnnnnnnnnnnnnnnnnnnnnnnnnnnnnnnnnnnnnnnnnnnnnnnnnnnnnnnnnnnnnnnnnnnnnnnnnnnnnnnnnnnnnnnnnnnnnnnnnnnnnnnnnnnnnnnnnnnnnnnnnnnnnnnnnnnnnnnnnnnnnnnnnnnnnnnnnnnnnnnnnnnnnnnnnnnnnnnnnnnnnnnnnnnnnnnnnnnnnnnnnnnnnnnnnnnnnnnnnnnnnnnnnnnnnnnnnnnnnnnnnnnnnnnnnnnnnnnnnnnnnnnnnnnnnnnnnnnnnnnnnnnnnnnnnnnnnnnnnnnnnnnnnnnnnnnnnnnnnnnnnnnnnnnnnnnnnnnnnnnnnnnnnnnnnnnnnnnnnnnnnnnnnnnnnnnnnnnnnnnnnnnnnnnnnnnnnnnnnnnnnnnnnnnnnnnnnnnnnnnnnnnnnnnnnnnnnnnnnnnnnnnnnnnnnnnnnnnnnnnnnnnnnnnnnnnnnnnnnnnnnnnnnnnnnnnnnnnnnnnnnnnnnnnnnnnnnnnnnnnnnnnnnnnnnnnnnnnnnnnnnnnnnnnnnnnnnnnnnnnnnnnnnnnnnnnnnnnnnnnnnnnnnnnnnnnnnnnnnnnnnnnnnnnnnnnnnnnnnnnnnnnnnnnnnnnnnnnnnnnnnnnnnnnnnnnnnnnnnnnnnnnnnnnnnnnnnnnnnnnnnnnnnnnnnnnnnnnnnnnnnnnnnnnnnnnnnnnnnnnnnnnnnnnnnnnnnnnnnnnnnnnnnnnnnnnnnnnnnnnnnnnnnnnnnnnnnnnnnnnnnnnnnnnnnnnnnnnnnnnnnnnnnnnnnnnnnnnnnnnnnnnnnnnnnnnnnnnnnnnnnnnnnnnnnnnnnnnnnnnnnnnnnnnnnnnnnnnnnnnnnnnnnnnnnnnnnnnnnnnnnnnnnnnnnnnnnnnnnnnnnnnnnnnnnnnnnnnnnnnnnnnnnnnnnnnnnnnnnnnnnnnnnnnnnnnnnnnnnnnnnnnnnnnnnnnnnnnnnnnnnnnnnnnnnnnnnnnnnnnnnnnnnnnnnnnnnnnnnnnnnnnnnnnnnnnnnnnnnnnnnnnnnnnnnnnnnnnnnnnnnnnnnnnnnnnnnnnnnnnnnnnnnnnnnnnnnnnnnnnnnnnnnnnnnnnnnnnnnnnnnnnnnnnnnnnnnnnnnnnnnnnnnnnnnnnnnnnnnnnnnnnnnnnnnnnnnnnnnnnnnnnnnnnnnnnnnnnnnnnnnnnnnnnnnnnnnnnnnnnnnnnnnnnnnnnnnnnnnnnnnnnnnnnnnnnnnnnnnnnnnnnnnnnnnnnnnnnnnnnnnnnnnnnnnnnnnnnnnnnnnnnnnnnnnnnnnnnnnnnnnnnnnnnnnnnnnnnnnnnnnnnnnnnnnnnnnnnnnnnnnnnnnnnnnnnnnnnnnnnnnnnnnnnnnnnnnnnnnnnnnnnnnnnnnnnnnnnnnnnnnnnnnnnnnnnnnnnnnnnnnnnnnnnnnnnnnnnnnnnnnnnnnnnnnnnnnnnnnnnnnnnnnnnnnnnnnnnnnnnnnnnnnnnnnnnnnnnnnnnnnnnnnnnnnnnnnnnnnnnnnnnnnnnnnnnnnnnnnnnnnnnnnnnnnnnnnnnnnnnnnnnnnnnnnnnnnnnnnnnnnnnnnnnnnnnnnnnnnnnnnnnnnnnnnnnnnnnnnnnnnnnnnnnnnnnnnnnnnnnnnnnnnnnnnnnnnnnnnnnnnnnnnnnnnnnnnnnnnnnnnnnnnnnnnnnnnnnnnnnnnnnnnnnnnnnnnnnnnnnnnnnnnnnnnnnnnnnnnnnnnnnnnnnnnnnnnnnnnnnnnnnnnnnnnnnnnnnnnnnnnnnnnnnnnnnnnnnnnnnnnnnnnnnnnnnnnnnnnnnnnnnnnnnnnnnnnnnnnnnnnnnnnnnnnnnnnnnnnnnnnnnnnnnnnnnnnnnnnnnnnnnnnnnnnnnnnnnnnnnnnnnnnnnnnnnnnnnnnnnnnnnnnnnnnnnnnnnnnnnnnnnnnnnnnnnnnnnnnnnnnnnnnnnnnnnnnnnnnnnnnnnnnnnnnnnnnnnnnnnnnnnnnnnnnnnnnnnnnnnnnnnnnnnnnnnnnnnnnnnnnnnnnnnnnnnnnnnnnnnnnnnnnnnnnnnnnnnnnnnnnnnnnnnnnnnnnnnnnnnnnnnnnnnnnnnnnnnnnnnnnnnnnnnnnnnnnnnnnnnnnnnnnnnnnnnnnnnnnnnnnnnnnnnnnnnnnnnnnnnnnnnnnnnnnnnnnnnnnnnnnnnnnnnnnnnnnnnnnnnnnnnnnnnnnnnnnnnnnnnnnnnnnnnnnnnnnnnnnnnnnnnnnnnnnnnnnnnnnnnnnnnnnnnnnnnnnnnnnnnnnnnnnnnnnnnnnnnnnnnnnnnnnnnnnnnnnnnnnnnnnnnnnnnnnnnnnnnnnnnnnnnnnnnnnnnnnnnnnnnnnnnnnnnnnnnnnnnnnnnnnnnnnnnnnnnnnnnnnnnnnnnnnnnnnnnnnnnnnnnnnnnnnnnnnnnnnnnnnnnnnnnnnnnnnnnnnnnnnnnnnnnnnnnnnnnnnnnnnnnnnnnnnnnnnnnnnnnnnnnnnnnnnnnnnnnnnnnnnnnnnnnnnnnnnnnnnnnnnnnnnnnnnnnnnnnnnnnnnnnnnnnnnnnnnnnnnnnnnnnnnnnnnnnnnnnnnnnnnnnnnnnnnnnnnnnnnnnnnnnnnnnnnnnnnnnnnnnnnnnnnnnnnnnnnnnnnnnnnnnnnnnnnnnnnnnnnnnnnnnnnnnnnnnnnnnnnnnnnnnnnnnnnnnnnnnnnnnnnnnnnnnnnnnnnnnnnnnnnnnnnnnnnnnnnnnnnnnnnnnnnnnnnnnnnnnnnnnnnnnnnnnnnnnnnnnnnnnnnnnnnnnnnnnnnnnnnnnnnnnnnnnnnnnnnnnnnnnnnnnnnnnnnnnnnnnnnnnnnnnnnnnnnnnnnnnnnnnnnnnnnnnnnnnnnnnnnnnnnnnnnnnnnnnnnnnnnnnnnnnnnnnnnnnnnnnnnnnnnnnnnnnnnnnnnnnnnnnnnnnnnnnnnnnnnnnnnnnnnnnnnnnnnnnnnnnnnnnnnnnnnnnnnnnnnnnnnnnnnnnnnnnnnnnnnnnnnnnnnnnnnnnnnnnnnnnnnnnnnnnnnnnnnnnnnnnnnnnnnnnnnnnnnnnnnnnnnnnnnnnnnnnnnnnnnnnnnnnnnnnnnnnnnnnnnnnnnnnnnnnnnnnnnnnnnnnnnnnnnnnnnnnnnnnnnnnnnnnnnnnnnnnnnnnnnnnnnnnnnnnnnnnnnnnnnnnnnnnnnnnnnnnnnnnnnnnnnnnnnnnnnnnnnnnnnnnnnnnnnnnnnnnnnnnnnnnnnnnnnnnnnnnnnnnnnnnnnnnnnnnnnnnnnnnnnnnnnnnnnnnnnnnnnnnnnnnnnnnnnnnnnnnnnnnnnnnnnnnnnnnnnnnnnnnnnnnnnnnnnnnnnnnnnnnnnnnnnnnnnnnnnnnnnnnnnnnnnnnnnnnnnnnnnnnnnnnnnnnnnnnnnnnnnnnnnnnnnnnnnnnnnnnnnnnnnnnnnnnnnnnnnnnnnnnnnnnnnnnnnnnnnnnnnnnnnnnnnnnnnnnnnnnnnnnnnnnnnnnnnnnnnnnnnnnnnnnnnnnnnnnnnnnnnnnnnnnnnnnnnnnnnnnnnnnnnnnnnnnnnnnnnnnnnnnnnnnnnnnnnnnnnnnnnnnnnnnnnnnnnnnnnnnnnnnnnnnnnnnnnnnnnnnnnnnnnnnnnnnnnnnnnnnnnnnnnnnnnnnnnnnnnnnnnnnnnnnnnnnnnnnnnnnnnnnnnnnnnnnnnnnnnnnnnnnnnnnnnnnnnnnnnnnnnnnnnnnnnnnnnnnnnnnnnnnnnnnnnnnnnnnnnnnnnnnnnnnnnnnnnnnnnnnnnnnnnnnnnnnnnnnnnnnnnnnnnnnnnnnnnnnnnnnnnnnnnnnnnnnnnnnnnnnnnnnnnnnnnnnnnnnnnnnnnnnnnnnnnnnnnnnnnnnnnnnnnnnnnnnnnnnnnnnnnnnnnnnnnnnnnnnnnnnnnnnnnnnnnnnnnnnnnnnnnnnnnnnnnnnnnnnnnnnnnnnnnnnnnnnnnnnnnnnnnnnnnnnnnnnnnnnnnnnnnnnnnnnnnnnnnnnnnnnnnnnnnnnnnnnnnnnnnnnnnnnnnnnnnnnnnnnnnnnnnnnnnnnnnnnnnnnnnnnnnnnnnnnnnnnnnnnnnnnnnnnnnnnnnnnnnnnnnnnnnnnnnnnnnnnnnnnnnnnnnnnnnnnnnnnnnnnnnnnnnnnnnnnnnnnnnnnnnnnnnnnnnnnnnnnnnnnnnnnnnnnnnnnnnnnnnnnnnnnnnnnnnnnnnnnnnnnnnnnnnnnnnnnnnnnnnnnnnnnnnnnnnnnnnnnnnnnnnnnnnnnnnnnnnnnnnnnnnnnnnnnnnnnnnnnnnnnnnnnnnnnnnnnnnnnnnnnnnaataaagaatagggacttcttagttatatcctaagggagtattaatactataaaatctactatcggtaggtattctaactaattatcctagttctattctatatagggttataatcgctacgctatatactagttagcaatttcactttatctatctgtctaagggtaatatatggttaataactttctttttatacctaggatttaatagaacttagtctagaattctaagataaactaacctccttaatcagagataattatatctaggattcctgtgatctaaataatataatctacaaataagtatactatagcttttatatctatttccttctaataaggaattaatattagtcgcttacttaaacggtctactactataaatatagtattatatctgtagtaatcttttaggaaagatctaaaatctattataatatattactatagttattccggtactagtagggaatatagtagtcctaaagtataatctctctatacctttattcttttataaattaagtagttattaacgtaatacttaatatctgttatctatcctagctaataatattattctaataccaatttctttagcttcttaattcctaggtatataattaacagttattaatatatctcattaagaagccttatataaagatctcctttattaggaacctcgagttagttcttaaaaagtaatagtctattataaagtatctactttagattacttccttcaatagctatctatcggaatagtttaagtttagtattttattagttagcttattttatatagtttataatcttaggatcttctagtttaattagtaagagctctataagatatacacctttcttaaagtatttgacggaaaaacggtggtaaggcgagtgtattttgtggcagaaaaatcttaataaattctctaactctctaaaactgacaatagtcctaaaacatgacaatctgatggacaacttagtaatcaaaacaaacaaaacaannnnnnnnnnnnnnnnnnnnnnnnnnnnnnnnnnnnnnnnnnnnnnnnnnnnnnnnnnnnnnnnnnnnnnnnnnnnnnnnnnnnnnnnnnnnnnnnnnnnnnnnnnnnnnnnnnnnnnnnnnnnnnnnnnnnnnnnnnnnnnnnnnnnnnnnnnnnnnnnnnnnnnnnnnnnnnnnnnnnnnnnnnnnnnnnnnnnnnnnnnnnnnnnnnnnnnnnnnnnnnnnnnnnnnnnnnnnnnnnnnnnnnnnnnnnnnnnnnnnnnnnnnnnnnnnnnnnnnnnnnnnnnnnnnnnnnnnnnnnnnnnnnnnnnnnnnnnnnnnnnnnnnnnnnnnnnnnnnnnnnnnnnnnnnnnnnnnnnnnnnnnnnnnnnnnnnnnnnnnnnnnnnnnnnnnnnnnnnnnnnnnnnnnnnnnnnnnnnnnnnnnnnnnnnnnnnnnnnnnnnnnnnnnnnnnnnnnnnnnnnnnnnnnnnnnnnnnnnnnnnnnnnnnnnnnnnnnnnnnnnnnnnnnnnnnnnnnnnnnnnnnnnnnnnnnnnnnnnnnnnnnnnnnnnnnnnnnnnnnnnnnnnnnnnnnnnnnnnnnnnnnnnnnnnnnnnnnnnnnnnnnnnnnnnnnnnnnnnnnnnnnnnnnnnnnnnnnnnnnnnnnnnnnnnnnnnnnnnnnnnnnnnnnnnnnnnnnnnnnnnnnnnnnnnnnnnnnnnnnnnnnnnnnnnnnnnnnnnnnnnnnnnnnnnnnnnnnnnnnnnnnnnnnnnnnnnnnnnnnnnnnnnnnnnnnnnnnnnnnnnnnnnnnnnnnnnnnnnnnnnnnnnnnnnnnnnnnnnnnnnnnnnnnnnnnnnnnnnnnnnnnnnnnnnnnnnnnnnnnnnnnnnnnnnnnnnnnnnnnnnnnnnnnnnnnnnnnnnnnnnnnnnnnnnnnnnnnnnnnnnnnnnnnnnnnnnnnnnnnnnnnnnnnnnnnnnnnnnnnnnnnnnnnnnnnnnnnnnnnnnnnnnnnnnnnnnnnnnnnnnnnnnnnnnnnnnnnnnnnnnnnnnnnnnnnnnnnnnnnnnnnnnnnnnnnnnnnnnnnnnnnnnnnnnnnnnnnnnnnnnnnnnnnnnnnnnnnnnnnnnnnnnnnnnnnnnnnnnnnnnnnnnnnnnnnnnnnnnnnnnnnnnnnnnnnnnnnnnnnnnnnnnnnnnnnnnnnnnnnnnnnnnnnnnnnnnnnnnnnnnnnnnnnnnnnnnnnnnnnnnnnnnnnnnnnnnnnnnnnnnnnnnnnnnnnnnnnnnnnnnnnnnnnnnnnnnnnnnnnnnnnnnnnnnnnnnnnnnnnnnnnnnnnnnnnnnnnnnnnnnnnnnnnnnnnnnnnnnnnnnnnnnnnnnnnnnnnnnnnnnnnnnnnnnnnnnnnnnnnnnnnnnnnnnnnnnnnnnnnnnnnnnnnnnnnnnnnnnnnnnnnnnnnnnnnnnnnnnnnnnnnnnnnnnnnnnnnnnnnnnnnnnnnnnnnnnnnnnnnnnnnnnnnnnnnnnnnnnnnnnnnnnnnnnnnnnnnnnnnnnnnnnnnnnnnnnnnnnnnnnnnnnnnnnnnnnnnnnnnnnnnnnnnnnnnnnnnnnnnnnnnnnnnnnnnnnnnnnnnnnnnnnnnnnnnnnnnnnnnnnnnnnnnnnnnnnnnnnnnnnnnnnnnnnnnnnnnnnnnnnnnnnnnnnnnnnnnnnnnnnnnnnnnnnnnnnnnnnnnnnnnnnnnnnnnnnnnnnnnnnnnnnnnnnnnnnnnnnnnnnnnnnnnnnnnnnnnnnnnnnnnnnnnnnnnnnnnnnnnnnnnnnnnnnnnnnnnnnnnnnnnnnnnnnnnnnnnnnnnnnnnnnnnnnnnnnnnnnnnnnnnnnnnnnnnnnnnnnnnnnnnnnnnnnnnnnnnnnnnnnnnnnnnnnnnnnnnnnnnnnnnnnnnnnnnnnnnnnnnnnnnnnnnnnnnnnnnnnnnnnnnnnnnnnnnnnnnnnnnnnnnnnnnnnnnnnnnnnnnnnnnnnnnnnnnnnnnnnnnnnnnnnnnnnnnnnnnnnnnnnnnnnnnnnnnnnnnnnnnnnnnnnnnnnnnnnnnnnnnnnnnnnnnnnnnnnnnnnnnnnnnnnnnnnnnnnnnnnnnnnnnnnnnnnnnnnnnnnnnnnnnnnnnnnnnnnnnnnnnnnnnnnnnnnnnnnnnnnnnnnnnnnnnnnnnnnnnnnnnnnnnnnnnnnnnnnnnnnnnnnnnnnnnnnnnnnnnnnnnnnnnnnnnnnnnnnnnnnnnnnnnnnnnnnnnnnnnnnnnnnnnnnnnnnnnnnnnnnnnnnnnnnnnnnnnnnnnnnnnnnnnnnnnnnnnnnnnnnnnnnnnnnnnnnnnnnnnnnnnnnnnnnnnnnnnnnnnnnnnnnnnnnnnnnnnnnnnnnnnnnnnnnnnnnnnnnnnnnnnnnnnnnnnnnnnnnnnnnnnnnnnnnnnnnnnnnnnnnnnnnnnnnnnnnnnnnnnnnnnnnnnnnnnnnnnnnnnnnnnnnnnnnnnnnnnnnnnnnnnnnnnnnnnnnnnnnnnnnnnnnnnnnnnnnnnnnnnnnnnnnnnnnnnnnnnnnnnnnnnnnnnnnnnnnnnnnnnnnnnnnnnnnnnnnnnnnnnnnnnnnnnnnnnnnnnnnnnnnnnnnnnnnnnnnnnnnnnnnnnnnnnnnnnnnnnnnnnnnnnnnnnnnnnnnnnnnnnnnnnnnnnnnnnnnnnnnnnnnnnnnnnnnnnnnnnnnnnnnnnnnnnnnnnnnnnnnnnnnnnnnnnnnnnnnnnnnnnnnnnnnnnnnnnnnnnnnnnnnnnnnnnnnnnnnnnnnnnnnnnnnnnnnnnnnnnnnnnnnnnnnnnnnnnnnnnnnnnnnnnnnnnnnnnnnnnnnnnnnnnnnnnnnnnnnnnnnnnnnnnnnnnnnnnnnnnnnnnnnnnnnnnnnnnnnnnnnnnnnnnnnnnnnnnnnnnnnnnnnnnnnnnnnnnnnnnnnnnnnnnnnnnnnnnnnnnnnnnnnnnnnnnnnnnnnnnnnnnnnnnnnnnnnnnnnnnnnnnnnnnnnnnnnnnnnnnnnnnnnnnnnnnnnnnnnnnnnnnnnnnnnnnnnnnnnnnnnnnnnnnnnnnnnnnnnnnnnnnnnnnnnnnnnnnnnnnnnnnnnnnnnnnnnnnnnnnnnnnnnnnnnnnnnnnnnnnnnnnnnnnnnnnnnnnnnnnnnnnnnnnnnnnnnnnnnnnnnnnnnnnnnnnnnnnnnnnnnnnnnnnnnnnnnnnnnnnnnnnnnnnnnnnnnnnnnnnnnnnnnnnnnnnnnnnnnnnnnnnnnnnnnnnnnnnnnnnnnnnnnnnnnnnnnnnnnnnnnnnnnnnnnnnnnnnnnnnnnnnnnnnnnnnnnnnnnnnnnnnnnnnnnnnnnnnnnnnnnnnnnnnnnnnnnnnnnnnnnnnnnnnnnnnnnnnnnnnnnnnnnnnnnnnnnnnnnnnnnnnnnnnnnnnnnnnnnnnnnnnnnnnnnnnnnnnnnnnnnnnnnnnnnnnnnnnnnnnnnnnnnnnnnnnnnnnnnnnnnnnnnnnnnnnnnnnnnnnnnnnnnnnnnnnnnnnnnnnnnnnnnnnnnnnnnnnnnnnnnnnnnnnnnnnnnnnnnnnnnnnnnnnnnnnnnnnnnnnnnnnnnnnnnnnnnnnnnnnnnnnnnnnnnnnnnnnnnnnnnnnnnnnnnnnnnnnnnnnnnnnnnnnnnnnnnnnnnnnnnnnnnnnnnnnnnnnnnnnnnnnnnnnnnnnnnnnnnnnnnnnnnnnnnnnnnnnnnnnnnnnnnnnnnnnnnnnnnnnnnnnnnnnnnnnnnnnnnnnnnnnnnnnnnnnnnnnnnnnnnnnnnnnnnnnnnnnnnnnnnnnnnnnnnnnnnnnnnnnnnnnnnnnnnnnnnnnnnnnnnnnnnnnnnnnnnnnnnnnnnnnnnnnnnnnnnnnnnnnnnnnnnnnnnnnnnnnnnnnnnnnnnnnnnnnnnnnnnnnnnnnnnnnnnnnnnnnnnnnnnnnnnnnnnnnnnnnnnnnnnnnnnnnnnnnnnnnnnnnnnnnnnnnnnnnnnnnnnnnnnnnnnnnnnnnnnnnnnnnnnnnnnnnnnnnnnnnnnnnnnnnnnnnnnnnnnnnnnnnnnnnnnnnnnnnnnnnnnnnnnnnnnnnnnnnnnnnnnnnnnnnnnnnnnnnnnnnnnnnnnnnnnnnnnnnnnnnnnnnnnnnnnnnnnnnnnnnnnnnnnnnnnnnnnnnnnnnnnnnnnnnnnnnnnnnnnnnnnnnnnnnnnnnnnnnnnnnnnnnnnnnnnnnnnnnnnnnnnnnnnnnnnnnnnnnnnnnnnnnnnnnnnnnnnnnnnnnnnnnnnnnnnnnnnnnnnnnnnnnnnnnnnnnnnnnnnnnnnnnnnnnnnnnnnnnnnnnnnnnnnnnnnnnnnnnnnnnnnnnnnnnnnnnnnnnnnnnnnnnnnnnnnnnnnnnnnnnnnnnnnnnnnnnnnnnnnnnnnnnnnnnnnnnnnnnnnnnnnnnnnnnnnnnnnnnnnnnnnnnnnnnnnnnnnnnnnnnnnnnnnnnnnnnnnnnnnnnnnnnnnnnnnnnnnnnnnnnnnnnnnnnnnnnnnnnnnnnnnnnnnnnnnnnnnnnnnnnnnnnnnnnnnnnnnnnnnnnnnnnnnnnnnnnnnnnnnnnnnnnnnnnnnnnnnnnnnnnnnnnnnnnnnnnnnnnnnnnnnnnnnnnnnnnnnnnnnnnnnnnnnnnnnnnnnnnnnnnnnnnnnnnnnnnnnnnnnnnnnnnnnnnnnnnnnnnnnnnnnnnnnnnnnnnnnnnnnnnnnnnnnnnnnnnnnnnnnnnnnnnnnnnnnnnnnnnnnnnnnnnnnnnnnnnnnnnnnnnnnnnnnnnnnnnnnnnnnnnnnnnnnnnnnnnnnnnnnnnnnnnnnnnnnnnnnnnnnnnnnnnnnnnnnnnnnnnnnnnnnnnnnnnnnnnnnnnnnnnnnnnnnnnnnnnnnnnnnnnnnnnnnnnnnnnnnnnnnnnnnnnnnnnnnnnnnnnnnnnnnnnnnnnnnnnnnnnnnnnnnnnnnnnnnnnnnnnnnnnnnnnnnnnnnnnnnnnnnnnnnnnnnnnnnnnnnnnnnnnnnnnnnnnnnnnnnnnnnnnnnnnnnnnnnnnnnnnnnnnnnnnnnnnnnnnnnnnnnnnnnnnnnnnnnnnnnnnnnnnnnnnnnnnnnnnnnnnnnnnnnnnnnnnnnnnnnnnnnnnnnnnnnnnnnnnnnnnnnnnnnnnnnnnnnnnnnnnnnnnnnnnnnnnnnnnnnnnnnnnnnnnnnnnnnnnnnnnnnnnnnnnnnnnnnnnnnnnnnnnnnnnnnnnnnnnnnnnnnnnnnnnnnnnnnnnnnnnnnnnnnnnnnnnnnnnnnnnnnnnnnnnnnnnnnnnnnnnnnnnnnnnnnnnnnnnnnnnnnnnnnnnnnnnnnnnnnnnnnnnnnnnnnnnnnnnnnnnnnnnnnnnnnnnnnnnnnnnnnnnnnnnnnnnnnnnnnnnnnnnnnnnnnnnnnnnnnnnnnnnnnnnnnnnnnnnnnnnnnnnnnnnnnnnnnnnnnnnnnnnnnnnnnnnnnnnnnnnnnnnnnnnnnnnnnnnnnnnnnnnnnnnnnnnnnnnnnnnnnnnnnnnnnnnnnnnnnnnnnnnnnnnnnnnnnnnnnnnnnnnnnnnnnnnnnnnnnnnnnnnnnnnnnnnnnnnnnnnnnnnnnnnnnnnnnnnnnnnnnnnnnnnnnnnnnnnnnnnnnnnnnnnnnnnnnnnnnnnnnnnnnnnnnnnnnnnnnnnnnnnnnnnnnnnnnnnnnnnnnnnnnnnnnnnnnnnnnnnnnnnnnnnnnnnnnnnnnnnnnnnnnnnnnnnnnnnnnnnnnnnnnnnnnnnnnnnnnnnnnnnnnnnnnnnnnnnnnnnnnnnnnnnnnnnnnnnnnnnnnnnnnnnnnnnnnnnnnnnnnnnnnnnnnnnnnnnnnnnnnnnnnnnnnnnnnnnnnnnnnnnnnnnnnnnnnnnnnnnnnnnnnnnnnnnnnnnnnnnnnnnnnnnnnnnnnnnnnnnnnnnnnnnnnnnnnnnnnnnnnnnnnnnnnnnnnnnnnnnnnnnnnnnnnnnnnnnnnnnnnnnnnnnnnnnnnnnnnnnnnnnnnnnnnnnnnnnnnnnnnnnnnnnnnnnnnnnnnnnnnnnnnnnnnnnnnnnnnnnnnnnnnnnnnnnnnnnnnnnnnnnnnnnnnnnnnnnnnnnnnnnnnnnaactaaatcaaaccactctccaataatccttgggtcttcacatttcgcgcgctcgtaattataacgtcttgagaatcgggatgcaagggtagggtgccgtttaacaaaatgtgtaacccaattttggccaactgaaataaccggggtggttccgcgttgtttaagaagaagatccgccatttctcgtaccatagagggccggggggccgatccacgagaatccatagagattatccattttcgaagagattcctcttcaattgcggtcaatttagtcaagttggcgcgagaagtcgcgcggtgttgtataccactgaggcggtcccgaagggttgaacgcggtacgttaaaagtgcgggcggtagtagaaatattggaaaattcttgattcttaaaagcctggatagctaataagatcctaccctctttctctattgaatctttagaggattgagagcgttttggtggcatggtgggtggttgaattaactaggtgctaattcatggacgcgtttttggatggggtggcgggtcgtatgtggtggcggctcgtatgtgaattacgttatgttgtagttagttagttagttagaaaatggtgctaattaaggcattcaggcatcactaagcccccaaagcgggttttgaacgctggcccttcgtaggctgtcggtaaatgcatctttgatgaaagtcagcctcgctataaataaagtaggagattataggttgtaccggtaggggctgtgggcttggcgtgaggctgagcggagattgctgcctgcagggctgatagatttcagcttcctataaatatttatcaactgcaagatatcctcaaagtcctcacaacccaagtcttcacaaaccatcatggctcccctaaaaatactggtcacgggcaaatcatccgtcacccatgccccagaacttggcaccctcagattctcagtaaagggaaatggctccgagcaagacaaagtcgccaaggaagtgtcaagtctatcgaccaacctacaaacctggatcaaatcagcctttccctctgccgacaatgagcccgatgcccctatgacaaaattctcatccacgagcatcagaacctggacaaagtcaacaggtagacacgaccagcccttgccaaacccataccatgccagtatatcattcaaagccgtcttccgggacttcgcagagttgaaccacgcgatcgaagaattgctggtttatcccaaggtggaaatcgacagcctggattggggtctcaccgacgaaaccggcagacgactggcttcagatgcgcgcaaattggcactgcgcgatgctatccaacaagctgctgattactcggaagtgctcggatgctctgtttccgtggtggaaatttccgaccaacaagcgagtccctacaggactagacaccttttgggtgcttgcaatagtactactccctttggggatgactctccggcgctggacctcacgcctcaggatattgatgtcgaaagcgagatcagtgtcacttttgaagctgcgtgagatgtttggcgttgttctttcttcggcccaaccagtggactgtggatattggttgcactagactacatgtttgatttatcaagatcttgaatatgtgatatattcgtattatatgttccaatcctttttgagcctcggttagcattaaagaaagccccgctgaagtccataaagccccgggaatggaatcatgcaaccaacttatagaatcaatgtacgtgtcgtaatcatccacaaagaagttcagcggcagtgtttcaactctagaaccagcacgaagtgtagaaggcagctctagcctctgtgttcttcctatgctggaagtcgattaattcttgccttgcctgagggggctcctaagcttcgaatcgtttttgaacagtcgccctaaaggagaggcaattcttagagtttgaatacgatgtagatatggagaaacagcgtgtcagattcttcagggtcagagtggacggaggggagaaggaggagaggagaggaagagagctactaagtagacaatgtgttccccgcttggtgccttagtcaacagacacccgacagctgactaattagttataatgggggaaagaaaacctgttgcattcactagctaagagagggagagaaaggaagtccaggtggggaagcaagatactatctatatgaggcaaacaacggtctcaacaagttaactttgtgatgaaaccgtatagagatatgctcaagaaacatgtataaggctaggtatgcagctaaattaggaaagagatgtcagcacgttgatgtgcgcttaaatgacggatttcaatagtacttactcgttcggctatacacttgggttgcccccagttgtccaaacgcacttcgccgcctcggtgttgactttcaacgacagtaggtctgggcgggaatagtggccaaccgtatcaatcattgccttggcgtagtcaatatctccgaggttgatatcagcttgcaggatgcattcctccccagcggggggtgcctccacgagagaggctccgtccggtccgaatatcatagagaaccctccactaggctgctcacagaaatcagtaactatcaccacggatggaaagaaaagaagaaaaaaacaaaaataacacagatgagaaaaatgagaattaccgtttggataatccctccttcaaccaggttctgcttttggagactctctctcttgactacctgcgtacaaaccagcacaaaggcctggccctcaatggcgaagaattgactggcattgcgactcgccacgtccgtttcatggaaaggccatttcaaccccttgggctccgggaactccgccggccagctagcgacgtgaatctgcaccccctgcgagtactcgtagaaccgtaggagcggctggaggtgttcccagcagttcaggcctccaatgcgaccaaagggggaatcgaccaccgtttggagagactccgcctggccctcgccccagatagaccgctccacatgggtgggcttgatcttacgccgatggtgcacaatctggccgccggggttgatgaacgactgcgccatgtataagctccccccgtcgcgttcgctgtagccgagcacgatgaatatacccgcttccttgacggcctgacgaatagtatccatttcgggggaatcacggtttagtgaattggccatgtactggtgcataagctccatgttgtccacaacgctgcccgtccacattgtcctatcgagcatggggcgactaggtcagttaatgacctctagtgtgcgcttgcggtggcatcattcccttaccacagatagcccggaatccacacctcggggaaacccaggacattgatgcccttcgcaccagcttcctggattaatgcaacgctctttgcgataccggcggccaggtccagccaggcgggctcggcctggacagcccccacacggactcgagtcatcttgtatgtgttaggtttctaatttggtaagtttactaggatccgacgtggtgaaaaaaaaaacaaaaaaaagagtaatatggtggtatcgatcaggtcgaaccacaagtgcactcgttctatttattatatgagacacatgctttggttatctcctcgatcaatgtctcgcataggcatgcctgtttgagaaagccactccttttttcctttgtatgtaccctgccatgccagctcgggcgaggattcacgctaatgcacatgcacctcctagcctatttggaggtgctgataataccaataccacataatgtacaaatatttactgagtactccgtacagatatattatctttggcgtatgtgcattagcgttctttttcggccggcctggcatggcagggtagcagatttcctcccccacttgttggctttccctgtctatcggcttaccagcgtatgttgtaggtatgagaggccgcggcctccgagctataatccgtccttttgtgggccccagcaccacgagacccatgctagacgaatatagtgcgttacggcaccgtactttcgagattctcctggcgagacgctgagtgagagtagtaatttactaagtccttaactcgacagtaaatctgattccgaatgttaccgtactacatacatatgtatctaactctcctcttcactgatcttgatcgagtattcgttctgtccattttttctatacaccattccttctaaatttcccccgaaagaaccgcaatgacaaccatccaccaggtccccaatgaagctggtgcaaacctcaacatggcgcacttggtgacagtcgacttagcacgcattgtgaccggtgactctcaggagaggcagaaactctacgatgctgctacacgtcctggagcgttttttttggacttcaagcagagcagtgaagctatactcgacgcctcgcagcagttgtatgcgctatcggaccgttattttcaacgtcccctcacagaaaaattgaaggatttccgtgaggatcaacctgcttccagcgaccgtgggtaagaaacactcttctaactcgttgttggcatcagctgaaccgactctatcaaagttacaagagcagtgattgtgatgagacattcgaggtacttatcagccctatccgttgcgggtggcagagactctgctaactatcttcacaagtttgccgatgacgagctcttccgtggtgacctaagactcccgtctattctgcaggatgaaagcgatcgagtccggcaattcaacaagctctgccatgccgccgccatgagtatactttcatcactctctgattccttgggtctggagggcgacggacggtttgaagcgtaccatcagactacagacagcagcgataccggcctcaagctcatatacgagccctcaattgacaaggccactgacgtggtcgagaataagcacaccgatagcgggagcttgaccctcctgttctacgagcagctgggattgcatgtctaccttcccgagcaggaccgatgggactttgcagcggtccctaagcccgggtgcgccctcgtcaccgtggccgactccctgcgacgcttatcagacttgaaattccactcgccgctgcatcgtgtcacgcagcccagggacggggctgtgaagcggtattttctatcatactttcttcgcccttcccacaccgccaaggccgcatagggccaagggccaccgagttgttaaccgatttggcccagcagctcggcaccaggttgaacagatagttttgtaggacttagcaacaattatcgttacttttgccaacctatgacctatgggttacatccctgtagatacatatatgctctacgtactccgtagtatttatagtctgtcatgtgaatttattataaacacactggtgcttctccatgctaataagctgaccggagttacaggggctgacagagcccgcccgcttggctgcgatccgaacacccgcacggtgcgaatacgcgactggtgcctttattaatcccgtcagacagtgggcatatctcgtcactgaggggagctgtccttagctgaccgtcctggatggttggtgttgttgtgtcgttctcgtcttgcctgcatggccaggctgcccatcgtgccnnnnnnnnnnnnnnnnnnnnnnnnnnnnnnnnnnnnnnnnnnnnnnnnnnnnnnnnnnnnnnnnnnnnnnnnnnnnnnnnnnnnnnnnnnnnnnnnnnnnnnnnnnnnnnnnnnnnnnnnnnnnnnnnnnnnnnnnnnnnnnnnnnnnnnnnnnnnnnnnnnnnnnnnnnnnnnnnnnnnnnnnnnnnnnnnnnnnnnnnnnnnnnnnnnnnnnnnnnnnnnnnnnnnnnnnnnnnnnnnnnnnnnnnnnnnnnnnnnnnnnnntccccatacttgctagctgacccctccctggatggttggtgttgttgtgtcgttctcgtcttgcctgcatggccaggctgcccatcgtgcatttccctcttcagtatcaatataggctgtggaattttatttaattattatataattagtaggtggagagatcaaagttcaaacaatgtgctacttatgagaatttcaagtgcttgtttgaggcctggctgaagctctactctcaacaatcaccggacgcttggttatagatgctcaagactcctaccgtcaaatcgcgcctaccttttccttgcccctgaagaacagcagagctacagtgcatgcggcaacggcaagcgagaaattgaaccattggctggcgtgaagtccctggagtaaggcagataaatcaccctcaactcccctgtggcttatggccctcctttctaccgatatttgcaccacggttgcaatcgtgattccaacggccctgcccacctgcaacacagcagtaatcagcgccgcgccgagggcctgatcttctagaggtaagcactgcaatgtgaaaagattgagtgtcggatggacaatgtcggctcctaatgtagacaacaacatggctgggaagctgtaagcccagtaggtagtcgacggtggtatgggaacggccataaggaggcatgaaatgcccacgcagctgcagctgaaaactaggaggtagtaacccgggacacgggagaggagtttggcggcaatgatattccccacaaatcccatgattcctgtcggtatgaaccgaatagctgtgtctagtggtccgagtcccatatagtcttggtagctaggtaagacatagctgtcagctcttatccatctccagtccctcgaggaagccatgatagggaggtatgacacttacaagtacgtcgcgtagacgaggtagttattgaaagccgcaaacagtgtggccatgatgacctgtgcggcattgaaacggctgttgcggaagatagaaatcctcaagagaggcggcctctccgttttcctgtcaaggtaccatatccacaaggcgaacaagagtaacaaaacgaaggaaagcaggagcgataacagaacccaggacttcgtccatccgacaacgttgccttctgttagagcaaggttaaggagtattatggctccagtcaccaatgtgccgcctacccaatcaacattgaccagaaggtcggagaaagaggaagcctcaacctttgagtgtgggatcaatatttgaccggccacagtgacaattccacagaggatggcggatacccagaatatccatttccagctgacgtactgcgcgatcacaccactaaatatattgcctagcaccgatccgcaggaagacccggccgagtagatagcaaatgcgtagttcttatacttaccgggctggaaagtagcaccgaggatcccgatcgcagtcggaacgttggcagctgcacccagaccttgcaggcctcggaataggtccatgacaatttcgttcggtgcgaacggaaccaggatggtaacgatggtgagccaagcggacccgatgaggaagacggagcgacgtccaaagatgtctgcaaatctaccaaaaaggagcagaaagcagccaaaggaaaggtaataggccgagataatccactgttggcgctcagcaggtatacctaggtctcggccgatactgggaaggatgataactgttgactggacggcgagtgtctgctatatcgtcagcaaaaatgcatgtgatttcggacctagcacctgacttgcattgagaaaggctgctccagccaaggtaagaataagcgggagatgaagcttctgccctgcttccagctcttggaacgattcgatctctggctcgggcttctcgttggaagtattgaaagtaccggcgctaatggcaagcggtttgttgtcggccgacgactccatgatgaaggtggcaccgtgcatgttatcaatactggcaggctgaggctgcgcgccagcgttcccagtggtcttcttcatcgtggcagggaaccccaatagccgtgcgaaagttgaattgccaaggtttgagggcaaaaatgggatacagggtttccctgtataggggaactaaacaagtgaggagattgtaacagagtagactcgggaggcgcaggttcattaggcagtgtgcaggatctatgtgattttcttcttcttctccctgtattttatttcatgctagattggagcataggcacattcaaaatatactatttagtagctaaagatggtaatatgatactagctgcattagcggattttattactgtaggaacaatacccatcttacagggaacttggccgagcaatatggacatgtcacatgcctaatcaggaaccctcggggagatgactgagcagagaccgaataagcgcggcctccggccccgctctgccaatcgttattctatgtattgatatccgagcaccattacgtaggtaccttgcaaacctacactaatcagtcaaaccccatttaaatcatataattgtctgagagaaaacggggttccaaagtggtgagggccttggcattttgggctgtgtaacgtgccatttttgcactatatggttattttattttagggaccagcataatcccgaaaataaagcgaaccaatagacttatattagtcacgtggacggtaggccctaaagcccacttttgaaagggaagtttgtggacccgggggcactatacctaattaggcagccttggcactctttatcgaaaagaaatatggggagccctttttcgaaagtgatcggggtttacggggtttgactgtacaaaatactatagaggatctgcggtgccccgatggactcttaattgcgccgcaaagcccggaaatacagagccattacaatactgttttttttttctctccagtccaatcggtaatttgactaatattgtcttgcgcgagacacccatactagtatgtatgttgtataggtcccgactcaatggtttctcggcatttgtatgggctggcaccaaataaaaccagaaatgctagtaacttatcgaggatcgaccggccactcttcctctgttccgtttacttcatgctcccccttggtatttgctcttttctcactcgaagctattccaccatcttccccagcgttcaaaatccctcgcaccatgggatctgtcgatatccaggagggtgtccaggaatctccccccaaaacgcctctgatcgaggatgccccagacggagggctcacggcatggttgcaagtcctgtgtggccatctgattgtcttcaatgtctggggttacatcacttcctatggcatcttccagtcctactataccacggctctaaatcgcaatgccgcggatatctcctgggtcggttccctacagatcttcttcgtctacttcctaggaacattctccggccgagccatggacgcgggctatctccgcgtcactttggtcacgggcctgttcctacagttgctgggcgtctttatgacctcgctggcgactagctattggcagctactgctctctcaaggtatctgtcagggcatcggggatgggctgctattctgtcctatcgtcgctttgatgtccacctatttcacgcggaagcgcacaatagccatctctatctccgcgtgtggtggagccaccggcggcctggtctttcccgccatcgcgcagaccctcctacaccgcatcggctttccctggactatccgtgtcatgggcttcgtgctcctgttcaatgcagtggttatcatggcctgtgtgcggcagcggctgcctccgcgcaaattaggcccattgatcgagttcaaagcgttcaccaatctttcctacactttcttcgcgttagggacgtttttctgcttctgggccgtctactatgcctattattatgttagttcacccccatctagtgtttccttcctgtcacttttgtggttcatcgtaactgaccaatatgtccaggtccgctcgtttagtcgagatatcataggtgtttctgattacacctccttctccatgttgatgatcatgaacggactaggcttgcctggccgtctaatcccagcgtacctttcggaccggtactgtggtcccgtcaacgcatttattccagtcagcgccatagcggccatcctactatactgctgggctgccattgactcttacgggggtctcacggcctttgctgtggtctacggcttcttcggcggcggtgtgcagagtctctttccatcggcggtagcgagcttgacggatgaaccgagcaaggccggtgtccgtatcgggatgatcttttctattgttagtatcgcctctttgacagggcctccgatcgcaggagccctcatcgatctcgacgggggtcagtatctatatgcgcagctcttcggtgggacatccatgatgataggttgtctcctgcttattatggcgcgatactttaagtgtggcatgaatttgtatcagcggatgtagcgagatgaaaaagagcaaagaaagctcaattgaggggattccgacaggcagcaggggaacagccacgacattatcacggagttcaatgtgggcctaactccaattttgtaatatgatagaagagacaggtactattgatttatggcgattttggttaaaaatgtcacaatctgcgttgtcgtatgtctgcatacgccataggccatattatacacctctagttctcgcccaacatagtcgcacatactccttacgatgttttccggcgctttcaaggcacattccactgaggcgatccgcaggttcctcttgcagagtgcaagaggcacaatttcatcggatttcagaagttgaataggaaaaggctgccaccgagccccgagcatcgtcaggcctcccttgcgcatgaggctccggcattcaataccactcacatgtcttttgaggatggcttgtctctaacgcggtagactagtaatggtggtgcatatcttggaaaaaaaaatatagaatagcgaagaactccttgcgagaaagttatattatgtgaggcgaagcttttccactgcatacagacatgcttcttagactttctatccgaggttctttcacattttgcgataagtattttggaaacctaaagtctcattcgtctatcctcatctcctatcatctattatcacttgtatctcccagattaatctcaacctcctttaatacattgttgttcatcgccctacgaattttgtaacctgcttcaactccaagtggtcatctccatttttagtctctcactcacgcaataaataaccgggcccttgtcgtccttctaccaagtttatcacttaatcaatttgatagctcgacacaatcccgccacggcctttgtgcccaactcttggccccgttgatattcatcatatctttgctctgtaagcttctcgtcctctgcgcaaagcttgaaagccagtcgctcagtccagatgatgcttctcaagtactcctgatccatcagcggcaggagcttagaccttaggacggctccatgcagcgctgaaaatgccgaagcgagtcctaacagcaaagatctattcttgatcggccgcatggagaggtgtaacaaggccacagagaactcacaaggccacaagtcgagcacctgctgaagcgatattggctgtggcagtccggcgtgtttcaccatgtgtagacctatctcgataaggcccacctttgctatccttctggcctcgtccatgccggccacgccagcgtcaacggaagtaaagccgttgtatgctttgaggacacggatgacggccgatatcgtctggttcgctgttcttgaaggcactgtcaccaatccttccaggacacactggtgtgtgaaccaaaacggaagaagtttgggaaggatagtcctggcgtcaggatttgatatcttcaagtcgtagtcagccgcatggatgaagtcgagaccttctaagcttcccgggacaaacagggggtagtgtatgcgaatatcccccctagtaggaggcggaagcgggggaaggtcgtcgaagagcctgaggtaagcctgtgggctcgggttgcacaggttgtcaatccacctcctgacaagatcgacttcggcagaggtgaaggacccaaacatcttgccgccccaagacagctctcgtatcaaacggctattggcactatcgcccggacgtacccatggttttgtcctagctagagccgcgacgaacctctcttggctctgaatcgaagagaaattctcggggatcagccactggccgagtgtctggccatcaagcttgataaggctgggacagtgaatattcccggccgcctgtgccttggctttaaacacttcagcgagcccattgttccactcgttgctagaggttgttggagagacaaattcagggcaagaaagcgcgcttgaaaggcaatagccggcttggactctcctccaggccctttctgccaccccggctccctctgttagttcgacgtgtgcgaggaatttcgcgacgctgttcatcgccatggcagtgtgtcctgaatgggagttatcgatgctgatgtgaaggaaaaagtaatatccactaatacccagctcctcaagctctttggccgccatcatggtctctagcgtaaggagctcgaagtgcatattatatccgagaatctcaggaagaaaatcgtgagggaagagggagatgagaagttgtgaaacggcggctttccatgctaggttattgaccatgccatgccgagggtggatgaaatcggccgagtctggttggggaagggaaattccagcctcccgaaggagctgactgtacaggtggacatggtgcatttccaggttcccatccccgtactcctctgacaagacctgccaagcgtctctagtcacatgtcgtttcccatacggcgtgctgacgcggtggatatgaccaacccaagctccatcgacgagcttaagtggtgccctctgctttatccagtcatgagattcatctcgggtctggaatagctcccgcattcctcccaacttccttctggaaatgtattgctcccattgtacagcgacttgctcatcctgcttcttaataaaggcttgtatggaggctgggctacagcttttcagggacatgattgaatcagctctttttcgctcccaggataccccctcggccaacaaagaaagcaacgtgtcccttgccagtgggaggaattccggataatcctccagattatgaagcttgaagtacattctcatatacagcagtcgcctgtattctgaagaattaaccgaagcggctgatgctaacaatttccttaacaattattcacatccatatgcagtataggggtgtgtggcaagtaacataccaggcaacttcaaatctttagctgaccccaccgacttagcaggttgtcgccgtgctgaaaaacctagaatccagaaagtggcaccacagaggcccaaggcgacaaagataaggtacggaaacatctccgtagaccgagtaaccttgagaggagcaatttcaagttcaaatttccaaacgtgaatgtccgtatttgggtctgtgattctaagaatacacgaatttcgaaattgataggctggtgatataggaaggagaggtccttaatattgtgagctgaaaggacgtggagggcaaagacgggatatcctatacagggaagaactaaaagagtagagcttggaggcgtaggcttatataggatccatttagtcttcttctttccgccgtctttctttcccactagattacagcatagcatcagtaagcacacttaaaatacccatggtgtaggtgtcctgaagtcgcctgcttgctctcctgggattaaaagaaatgactaaaagatagagaaatccaaccatgtctttttaccatatgtaaccaatgaatgtagtccaaggttacctaataatacgtaccgatgtttttttttttgtattatgttgtaaagcctcttacagggaataaaacaaatgattgatgtaacgtatcttgtactgtggtcgagtgaggttaaaaacgaagtctaggcctcgatatgccttttacatattgttgccatatactaccaagggtactttatttagagatttcccttttgggagggaacttttggaggcagagtgtagagtacgccgcaggtgggggcgattgcggcgacggcgctaatacagttcctccgcaaagtttccgtacgaatatatatctccgtacggagacttttgcggaggaactgtagatccctgtggaggttggtgaatctaaagttggaaggagtagttacagggcacgtgcgagggcacggatatcataagtccaccgggcctccgccggcggctcggcccagccccgctcggtcccactcgccctcgcccagcacctcatagtaccatttcacgaaagcagggtgatttcggccgaaatgccgtgactcattctcgacagcatcgccatgtcaactgcttcttacctatatataaaaatttcacccctctcgttgtggcgtacctccgtgcgacctactcgaaagcagtctgaacagtgggtttgctgttttctttcacccatctacaacaacgccctgattacagacctccaaggttgttcaccccagtatggaaggatcctaccccctgcaggcacgcaacacggtacgccgccaccgcgaacgagccaagtacgacttcgagacggttcattccattgtgaacgcgtcacccatcctccacgtgtcctttctgcctacggacccgagtgatgacccctttccaaccatccttcccatgattgggtatatgggctcatttgatggcccatcgactggggctctcgatgtatatcttcatggccatagtgcctcacgtgtcatgcgcttagccggcaaccacggaccggagggaatcccagtctgcatcgcaacaaccctgctcgatggtatcaagctctcgttgacgccctttaacaacagctgtaactaccgcagtgttgtgctgcacggctatgcctcggttgttacggctgaagcagagaaagaatgggctcttcacctcatcacggacggcctggtgccggggtgttgggacaattcccgcgtgcctcctacgcgtgccgagaacctgagtacatctgttctcagagttcacatcgccagcgctagcgccaaaatcaaccagggtgggccttctgatgacaggaaagaccttcaaaacgacgaggttactggtagagtgtggacggggacacttccactctgggagtctgttgggacacccattccaagcattacaaacaaagtgaccgaggttccggggtacgtggttcaatggcgacagaatcaaaatgcgcagaacgagtcatacgctcgggaagccattgagaagggtaaatagtgataaagctagtacagagtcttctctaaacattacaatgtgatcagttcccatcaggataggccaatttatccaactcctgccattcttcgctctctgcatacgtggctcggataggagccagcagaacgttgaacgcatccgccacggccctcttcaaagattctggttgcagctggcctgctacgaatgctgcttcaatggcctcatacgaggtgaaatcctgcccctctccatgctcagcgtaggtggtaaaaacagtgtcaatcggcgaccctagtctgcagaaagggcgctggtccagctcggaaccggtgctctcgtgtaagttcaggcctgtcttccctagtaatctttccatgcgctgctcactgatgggaattagaatatctcgaagcagccctaggactccatttcccgtgacttgtcgttcggggcacgctgcgccgaatatcttgccacggactgtttcggggtcgtccagaaactcaatcttcgtctccgccgacttggaagaggacatcttcaaaccatcaagccctgctaccatggcattcatcagatgctcccggcggcggtacccgagcatagggatgaacttcttggcgtgctcaaagaggcccgtctgatccccagaaccgttagcaggaatttaagtgagtagttttcatcctacgaacctgatcctcgccgccatactgtatgtccagatccaggtacggctctgagagtgactggtagatggagcagagcaggggacttatttgttctgtctctgccacttcagctgaggtgtcccgcgcatctttttgcgtcatgatggcgcagagcttctggacatcaatcacaaagtccttttcataggcaaggctggactcggccacgaagttcacttgagacggtgatacgccaagtgccttcaggatagcggtgaccaggaagtggtaatactgttgtcgatatgccacagtctccatggaatggatgtagttaacaagaaacccgtagacgtcaagatagtacacagtcacctaagcatgcgtcagtacgcaggtcggcttgggctatagatgggttatacggacatcaaggccagccctgaggaagtcaagcagcttcgcaattggcacgaagtatccaacatgagctatacgacaaaggttagtgccagcatcattctcctgtcagccaaaaggacacatacgcttgcctgtaggtgtggtttcccaggccaacttgagcttaggcttttcttccaggagcccttgcagagattctgcgtccgcaggttcgaggaaggattgcctcctagtaatgaggttcagcttctcctctgtagagagcatcttttgagacattgaaaaggtttggattttaaattctagtcctggaatggtaggaaatctgcttccttaaatactaatcgtcatttggggatgacatgaacggcactattcgagtcccttgcgaaactctgtggggacctttcgtatactatctatgatgggtgaatttttgctgtgggccagacactacgctatagcattggctgaatttcagtacctaacagggctttcggtacctgaccttttgctcgtagccgcagtagtgcccatcgctcctattttcggaagaagccatcgactcgccatgatagtaagcgggagccccataatgaccgtaggctacatcaactaatgccatactgtagtattaaccaagaacataagccacataataatgctgatttgcaaatactaccctggcaacacgggcaagcaacggacggacccgccaaatactgtagttctcccccgaggcgtgatcacatgccacctcagcttgcagatgccggtcttcttcgggatggtaggcggagaatccgactcgaagaggctcgggctagtagcttagcagatgcggaccaccttggcagattcagcctctcgtaagatatttaaggatgtgagattaattccgccggcctccgattttattccggagcactgtcccctacgtgaggtggggctcgtttactccgaaagatgcaggtataaactcatcgcaaggatggaggaagagcaagtacggttacatcgcgcatatccagggatatttccaatcgggtcttctcgagcatgtatgtagtccgtatttttgggttcaaacaatcgtcttgaagtggtatgtctaatttccacaaatattcactctcgtattctagttcaccggccagtatcaaggccaaatatttcctcaagtatatttttcctttgtctgggtgctagcgtatctatagatgtatcaatgttatttgaagggtaacttacctatgtaaataagcttgacgttttgcgttgtatcgatgtttctttgctaagtcgagctagacttttcaagagagtagtcacttacttattcgcatgatttctccatctttcttaagactctctgtccctcatcactacatcagtccctaaggctagacttagaaaagaacggtagcataccatggctcaatccctcccgcatctgcctaagggcatcccatcccctctggttatgtggaaagacatgactccctatcacgcacgactacaggcagcaagcctctcgtctcctcgggtcctcgtgattggaggaggtgtgacgggcttgataacttcatgggcgctgcttgacaaggggtaccatgtgacgatcctctctaaggagtgggcatcgtacggccacgagcaacggctgacctcgcagatcgccggcgcgctgtgggaatttcctccggccgtgtgtgggcagcacaccgacgccatctcgctggccaactctaagcgctggtgtatggtcgcctaccataactgggaccagatggccgccatccccgctatcgccgctgtttcgggtgtgtccatgaagccagccgactttttcttccccaatcctattgaggaggacccggcgcagttggccaagatggaggagatcatggctagcggcgttcgggggttcctccgctctatccgcctaatagagaagcgccacatcgatccgcaatacggcgccgtcgatggttatgagcacttggcaccgattatcgacaccgaccaatgcatggcttggctcatggatctggtccaggccaaaggtgccacgctcgtaacggagacactgcagggggacatcctcgaccatgaggaacggcttcgtcgacgctttcaagcagacgtgattttgaacgctacggggctagctggtgccgagctcgccggcgatacctcctgctatcctatccgcggcggactaattcgagtcatcaacgatggctcggacttccccaaggcggaggccgccctcaccatctccgctgatgccgcccactctgagcatgagatcgtcttcctggtgcctcgcaacgacaacatcctattgatcggcggcattgccgagtcccacgaatgggatctggatctgacactggactcgcccatcattaagcgcatgcgagcgcgctgcgagtccttcctccccggtctcaaggatgctcgcttggaccctgactacccattggcccagggactgcgacccttccgggcaaagaatgtgcgtgtggagcgtgaactgcgcaaactgggccgcaagcctagccgcattgtgcactcatatggccaaggcggtgcgggatggagtctctccttcggctgtgcatcggatgccctggcgttgattgaagaagccctgctggatctggaaccggttcctatggccattcttgatcagaaagattattcttgccccatggtatctcagaccattcaggccaacttatagtggatatctgcctctagattttagtcggcgcacgcgtatgagttgatagtagacatcattgccagggttcagggtccggatcctcgcccctcatagaccctcatttcatacaatttctacgctttacataaatcggttgaataaatacgccgattcatccaataagatactgttgtttacacctgttctagtactttggataatctatgttgttcatcttgaatatatctttctgtcctaagtaaatttgcgaaattgcgcgataaccaagggccttacgactccataaactcgatcacgttatttatcacctccagcacttttgtctgatactcacgtgaggctgccttgcccgctgaaatgatggcttgtgctgttgaaatagcacctgttctaactcagaggaagattaataattgggtcaggaattatttcagacgctgcggctttgttcctgatctgcaacagcctcatatcatctcgtattgacgcactaggcattccttcctcacctattcacatcatgaagtggtgcttgacatcaatatacttggacttccgttggaattatgagtttctggtaagcttcaaggcagaactgtcaacgtagagaggaactgcattgatatgaatcccggggatgcagaggtcattgataaagtttcgaatcaatacagcttccttcgcagcctccacacatgcaatatgtctccgcatctatggaaacgactgattctaacttctaatgctacgtaaagtgtgactgtagaagctctggggaagataatgatggttcattctctagtctattttttctgctggttgggtttttctgccaaagttagccgttgacttttcaccgcattctttctcatgattttggagcccgtaggataaaaccccctggtcacgtgacatacacacacacgaggttatgatgtaattgcttcgctttgctccgcaattaatgaagcgagacgaagaatacagaaatgtacttagacggcgtcatggtaatatcataaatcatttaatggctattcaaattactatagggataccatagtaaatgatacaagctgatcaaaaactgcggccagcgggagacatacccgaagtagtttagcgcggagtgtgtcgcaagtaaaatgaatgtgtccatagacgttctctacccaaaaggggtcgaattagcgattatggggggtccctgtaacaatccccttctttattttattcccttgctcaagtcattcaatactgatgtaggcgcatacaagagagaagtgatcaaccagaaagcgatgatatgaagatggatggaagatggtgatctagctactgccatgaatctctctatatagctccatgctacaaagccaccagatcccatcctccagaaatcagaagaagcatctctgcaggtatacaaagagaattccaacacggaaagctgaacagcaagtcatgtcatctgcgagtgaagtgaaagaaagggaaaggctttatcgaggtcaccagttaccaagcattcagtaacttcagctatcagagctaaccatgcagtcgtcgatgtcaggccaagcgccaagtcaggctttccagtcgaacaagcggcgaagactcgtccctacgattgatcctgatatgatcgagccacttaaccgcttttcggatatgctcgctgatatgaacagcgatgatcctgtcattcgatcccgtgcggctgcgcagcttacagtattatctcctttaatgcaacaactcgcctttgcaaagaacgccgccggcgtccattatgctgcaagggatttcaaaacccttggagtggcctgtatattctggagatcacacaaggaatgcgtcaaatacagtgtgcatcacacacgcataatggaacgaagtatcccggtaccttcaaaatgcaatcaattatatttttactcaaacagaagagcaaattaagtccgatctaaagtgtgtcgatgagatccgcaaatcattggccacaactgccagcaatctctctactttgtccactcgcaaacgccgccgtgaggaacccgaataatgatattcgcaagacaaagtcgttgccctctgagaagcttcacctggggtttctctagctcttctgcttattctccttcttccatctcttatttcaaagcttcgtttatttagtattctcctgagactcaaactgtcatttttagtctacgcagtaccctagggtcgagatctatatcgcttaaagagagaccatatgtcttttatgtcagtgtgaccaagtggataggagtgaggatttatgtcataagacacagcagtgacaccatcctgattttcgctagctcgtgtcgtgcttcgtgaacatgggtttcatatatccacggttcagtcattacaatctgtggcatttgatgtctagctattgaagaggggtccctgtaacggggacaggggcaccgatagccctgcttgcaaaacaggtgtgagagcagagttgttactgagagggtgctagagaggagaatatgttgggtgaccggaaggcggtcacccatgtgggtccagatcactagatagttccgctccctcttcctctctctctctccctcttgtccatcagatcttagccgaatctacactagttgttttccccttttcaggtacaacgtagttagatcgccattacaatctcaggtatctttaatctgtttgatcactacattctcacttcaagatcattgatctctaaaaaataagaaagaaaattgctgaatctgatgcttaattaaggatatcccacccctccgatacctcactacactttcagcctggtactgactttgttgggctctgggtatgattcagatccagccagatcaaaccatgagaccagaaattagtcttcacggaagaggaagctgcagagggagatagagactaagctatgctcgtggaatgggaaactacaaattcggcaggcacgaacctattaagtcgagagtacatcgtgtttcccccgagcactcgatgtttttcctctcattaacattcttgttatagagtacattactgccacgatcacgatcaccactactttcttgcatatcgcctctgtggctccctcgcccacccctccctccgctatcgataacctagtgaggatcctaaatagaagctctcgattctcgaaacacgactgggggcttttcgtgcattagctgacatctcgcggcatagcatctaaaacctaaatccggcccccgcggccgaggatactactgctaagactgtggcccatgccggcgggacagccaggtaagttgtgattcatatgccccatcattgcccctattcactggtagtaaacgctaattttggaacatgttgaagccaataccaaccccgctggccccggcctaggcgggccctcgagcccctcgcttgtcggccggctcttcgacaaggggaaagaccgcttcgccagcaaatccagtggccagcgttgcccgcaccgctgcccatggtttgaaggaaggcggcaagcccctcccctaggcggcgtgaggggttgtggtgtcgacagcgttcctctgttgttttgtccgatttcttctctccgagaacctgagctaggtgagatgaatgaaaacggatgtaccatatatgtaaggcggggatggcattcctctggggccttttgaccgtttttgcttctgtactggcctcggtattccatgtccttattattttcacacccgcaatcccaaatattgatctagtggaagtctgacaaaccaggtatcaaggtagatacttgtctcaacactatatatcttcctgtttgcgagttgtccaccgtaatactagctctttcaatgtcatattttgatccttgacacgcccctaatagtgttcttcgccaacctcgaatgcggaatcgccattgtatgctccagggctgacaggttagattacaaagcacatctagttaactaacgactacccaccattagggttccttgctcttttatgtactttactttcttgacaagtagcaaacacgctacatgtggtgcccttgatggaaatggatcttgacagaagacgaactgaaatcctccgttcctacaacacaatggctaggtgatttccggattgggaaatatatccctttatcctcctcatccaatgattccacgcccttattcaagctccaagcaggagtcggctccttctcggatcggccgccaatgtttcgggccgatcttgagctctttcccgctgtcggcatctgtgccgagcaggcgccttctactccgatcgctttgactagtacgctttgagccgcaccccactgggatatgctgatcggggcgaatcggagcccctccatcattgaacagctcatgagcaaaccagctttgcctgacgattccaaagtccaatccgaggcgctaggtaccaataggcgaactaatcatgttacagttctgctacaagaggtcagtggattttgctgcttctgtcctaaaatcaaggtccaagagtgagagccacagagatccaggttgctccactgataagcccgaacctgatccgcccgaatatgatctgcgtcaagctccttgaattgcagttgacctgttgatagcagctgatgctacttttgtacttcgattttgtattgtagataatctaatgtaatattcgggacattgagattgacaatgacatatagaataaagattaacgcaagtacaagtgtcatattgccctaaatggccgtactgttcccgtcgttccggtcaacctaggtaaaaaagcccagcggtaaaaccagccccacatccccgcggagccccaacgccgccgataaccgacctcggctcaaagcgaccccgtgatttacatatgacctttatcttcctcccgaggttactctttttcccttccttttcttcctcatagcaccttgagcttattctacacttatatcacaatggcttctattattcgttctttgcgacctttgtcgcgtgcccctacagtccgcctagcgggcaagcgcctcgctgctggccggcccgtgcagaggtaccgttttgcccatgagcacaccaatgctattaaaaacaaattcgctaaccagtttacccccattatagcgcgtatgcattttccaccacaccccgccggcgggaggtcgacatctccgagctgaccccgacacccatcacccatttgtctgagacggagtctctgatggccgactcggtatcgaagttcgccgcggagcaaattggccccaaggtacgggatatggacgaagccgagcacatggatcccaaggtcgtcgagcagctcttcgagcagggcctgatgggcattgaggtgcccgaggagttcggtggcgctggcatgaacttcaccgctgccatcgtcgcgatcgaggagttggcacgcgtcgaccccagtgtcagtgtgctggtcgatgtccacaacacactcgtcaacaccgccatcttgacgcacggagatgcccagtctcaccgtacctggttgcccaagctgacttccggcactgttggttcgttctgtctttccgagcccgcgtctggttccgacgccttcgcgctccagaccaaggccgagaagaccgccgatggttataagatcaacggctctaagatgtggatcaccaactctatggaggctggtatcttcatcgtctttgccaacattgaccccagcaagggctaccgcggtatcactgctttcattgtcgagaaggatacccccggtttctccatcgccaagaaggagaagaagctcggaatccgcgctagcagcacctgtgtgctcaacttcgacgactgtgtcatccccaagagcaacctgctcggcacggaaggacagggatacaagtacgccatcagcaccttgaacgagggccgtattggtatcgcagctcagatgaccggtctggccctcggtgcatgggagaacgccgtacggtaagctttcttgttcaatccacacccgcatatgaatccgataagctgaccaaaccaaagatacgtctggaacgaccgtcgccaattcggcgacctcatcggaaacttccagggtatgcagcaccagattgcgcaggcctacactgagattgccgctgcccgcgctctcgtctacaacgccgcccgcaagaaggaggccggccaggacttcgtccaggacgccgctatggctaagctcttcgcttcccaggttgccggccgcgtgtccagctctgctgttgagtggatgggtggtatgggcttcgtccgtgagggcattgctgagaagatgtaccgtgacagcaagatcggcgctatctacgagggtaccagcaacatccagctccagaccattgccaagattctgcagaagaagtacaccaactagacgtgtgatgggggtgattacctacgccaaatggctttgtttgtatatagtttgattccatgcaggatgtggcgtattgattgtttttgggtatgtattcattgttccctttggggtatacacaaaacatgaagagccatcatgggtcatccctgtgaccatttcaaattcactccgagatatgaatgtcaaactgtgtacaagagtaaagagcagactgaggccatgcgaatgtgcccagccttgtttgtatatccaatcctagcaatcatcttctggcgtctgctgaccaccgctcatcgagtcgcatattgtagatggaccgtgctcgggcagcttacttcattcgacagggcgattatttctgttatcatttttgtcgttattatttatgcatgaaagacaattccaatcgcaatttccgcaacgactatgaagtattgctttgagatctatagcaatgatcagtatgcatcttcgtatcgaggttcttgaacgaaactcacatgacaggagaccagatcgcctgaactcgcaaggcattatgtttccaccgaatcaatgtccttgaacagccccggttgctggcacatgcgttattccacatgtgctattcacgatggaggcacccatggaaactcgtatgtcggatccgtccgttgcgattgaggcattggttgcgggtaagctgatgtggagggttggtagacttgggcggaagtgggctgaggaacgggactggcactcgacatggaaagtgaccgatcgctgtaagtgaattcggagaaagaggattcggattgttgctgaggtgggcagatgggttgtccttggtgaattcgactatctatgggatatggctccatacgattcgggaattcgggattggaggctgcgccgagcgacggcgaccttgtgggcggatatggttgctgccagtcatgctgaggagacgctcgacgcggtactaacaggctcgatggctgggtgtgggatgttgcagtgaagtgtggcggtggcaatgcccctgctggaatacccgatattgcactattccggggttctcccaaagaccactcacttcgaaacgaagccatcggttcgttactggaggcaaactccggtcggccagtcaaagcagcaatttgatgcttcaatcggatgacttcattctccagaaaggcattgtgttgcacgacttcatcgaaccgctcggttcggagccgcatctcctcaatttgtgactcaagatgttctatatgctccttggtgcgttggcgaatggaccgttgagcctctcgatcgttggcacgctttcgctctagttgttccgcggacaatgtcgagactttccttgaccccgatcgagattcacgtctcctcgcaggtggttcatcttgagagctcatgattattggtttcctcgcacacccgagactcgatataaagctcccctccgttgcccagaacctttcaaagagaaccccccgctggcgaccatgaacccagcacttcagcctaacatgaggggaagtggtggatcactggttttgaaagatggcgtgtgggtggctcgagactatttccgagcggagcagggatcaaggaagagagagcgtgacagatcgtgccaattcagggctagattagcttggacgactatacggtgtggggaggaaaataaagatgatgtgcgtggtatagccatggatcctttcaggacgtgattataaccttcccagcaaccgagtggctgaataagacctgaatattgttcccctcttcaacacggcacctcattttctccagattgcttaacaagccaggcaaatctccccgatgatgcggcgaaagcgagactctaagccgacccctaagcacccaataagcgtggagagatcgaactgtgtggatagctacggagtactccgtacgggtcatgaatatagtgttttctttccagccactacggtgagccgcccccatcgcgaggtccgcttttttcgactcctgctcccacttactcaagggtcttctgttggcgccaagccgtgcgccataatgatgggcatttatggggtgctccgtactccgtaccgtgtactccttttccgttctgtgtgctggctgagcgattcaagttgagtgttgttccgtcaagccggggcgcacagaaaaagtactaaaaagacggcttgcgccataaggcatccacagaccatcggtgatgatccgcgtctttgtggagatagcgtcttgtggagatatgtacggagtaaaaggcggacgagaatcctttggcccccgatggtccccgagaatgtccaggtatccacgggctccggggaattatttgcacggtataagcagactaatatctctagaagaagggcatctgatgttgtcagactgattgtttgaaaggcatttgtccgcaatagccgcaaggttttgacactcctattatcgtggtcttatgttcaccctaagaattttaacgggggattgcaattttattattcgagcaccaccgtgtccgctctgacgggaattgagaaaccggatgacctctgcattttgatgtttgatgcgtctaaggatcttattgaccatataggggattttacctattctggagacataattagactattccggagacatagttagaatcactcccccatagatgctgcgccttgctcactcgaaatctgccagagcataactcatgcttaccgacgtttaataattgactgaaacgtatacaagcgacaccgacatgtccagcatacgttgtacatgatcgccatgatgtggaggtatgtaagtggggaattgggcacggtcatgaaaatgctacacagtagaccttacgattttaagcggcgtgtatgcggacgtttgcactggtttaagacacggtccgtgacctccggtcgatcatatggatctgatgtcggcgttattcgccgtgagccctaaccgagtagccactcttgaatttacgatattggccaaccgtcccgaatatgttctagtcggtgagaataaaaacgcgcgcaaagtatttgattggatgaggaatgattcgtgttcatgacgggtggcaaggaaggtgactgccataaagtgaggaaaatgttataatttggctgagatgtccttagcgaagctgacaaccctgttagggacatcatcggagattgcttacaacaatagaatggcccaccagaagtacctacgtaggtgctactactatgtatcggtcttcgccccatattgggtgatcgactaggactattgggcgaatcatatcaataggatatggcctcgaagcatcttgcagggattccttgaaaatctgagttctgacatgctgctttgcgtttcttccagatcattctcctctgtaaatcgctgcatgttttcaacgtaaatgatcacactaacctacgccctagaacttctagaagtttcccccgccggttcaaagcctccggaaatatggccacgagaaggaattctcagcagggataactactaaaggtatagccataacatccatctaattttggccaagtatttggacccctgatatattttcgcatgaaaaaagactctgagcaggcgaattaccatatgcggttagtctgacttcccaggaactgtcccacaattcacgtgatatcaagcgaagatagtgggtcttatatggccaatcacatgacgcataccagactttaggacaatcttaaatgcttggcaacaaatctcttctttgtcaaatgtaaacttgtaatgattcacatcatcaagcatcagtctaaacttttgctaaactagaacaaactaggaagaaagattacactcactcacaccttctctttgtcttgttttgtcaacaaacattaacattcattcactcgccacttcgagtttgaattttcatcaaagcaattaactgcagtttcttgaagaaatataagcctcgaccatcatggaaggtcttcaactcaaagatactcagctgtactcaactatggctgggaagctggatgccaggctcctcaaagcccttgaggtgatgggcttcaccaatatgacccctgtccagcagcgtgttttaaacgagctgccaagttggcgcagtgactgtcttgtccaagccaaaaccggaactggaaaaacccttgctttcttgttgcctgcattgcactgcctgcttcaaggtgataccgcgccacccaaaggcaaggtcggcatcttgatcattaccccaacccgagaacttgcccaacaaattgccaaggcgtgtgatgaactaacctcgcaacttcccactcctcttgagtgccatgttgcagtcggtggaacagcccgagcatccgctcattcgcgcttcatgaagggcgcaccttccattcttgtcgccaccccgggacgcctgtgcgactacctttctcaaactcccaccgctaagaagttgtctaacatccagacattggtcttggatgaagccgacacgatgcttgagagtggctttatcgctgatgtgaagcgcatcctccaactgatcccacaaaagagcactgggtggcaaggcatgtgcttctcagccactgtcccacccaaagtcaaggatgtggtcaatattgtgttgaagagagactacaccagcatttccaccattgataagaacgaagcaccaacccatgagagagttccccagtactacgtgctgatgccatctgtggcagataccttcactacacttgcctccctgctcaagcatgaaatcaagactagctcaaaaattatcgttttcggcgtgactgcacacatggttgctctcctcgcaggagtcttctgcaagggcatggttcatttgaaggtgttcgagatccactccagactcaaccagggtgctcgcacaagaaccaccaaccagttcaaggaagccgaatccggaatccttttcgcttcagatgttattggtcgtggtatggatttccccaacgtcgacttggtcatccaggtcggtttgccatcgaacggcgagcagtacgttcaccgcgtcggccgtaccgcccgtgctggcgctgacggtcgcgctatcattctcctcacggagggcgagtcgttcttcatcaagaacaaccgccagttgcccatcaagccccatcccgactccgaagcgatcaatgctggcgctgcttcatgctccaaggctgtcctagcggccatgtacaccatcgacgaagagtcgaagcaacgtgcttactcgtctttcattggtttcttcgctgggtccggtcttctgaggcagcttcgtctcgacaaggctggccttgttcaactcgccaacgagatggctgtcaagggcatgggatgccccgagcctcccccaatggacagaaaggtcattggcaagatgggcttgaagggcgttccgggtttcacctatgcagacccgaatgagatgggccgaggaggatcctctagacctcgcaactcttcccgaggtggcaagaatcgcgatgcactcagccctggagctggtcaaggagaccgaggcggcgttgagaagcgcggaggagggcgcggaggccgtggtgcacgtcgtggtggtggcggcggacgtggaaagccgagatcatgatcttttttgcatattgatgtcgagcacagcgtgctaaaatgttattatccatagacactagagactaacgacctgctacacaaaattccttaatcgaacccaaaattacttgcgaacagttgtcacatcttgatgtaaagtcgtaaaggccaaactggaagctagccacggtactcaccattgctttgagtccacaagattccgacttaattgacacagtgtcattattgatcttgacagttgttcttgggaatactaaaatggtcaggtgatcacaggtaaacacacatttagagcttcaacactctaccattccaacacgtcattctttaacttggaacatttcagggcgatcagctatctatattgataactgcccaatatggatccgagctacaaagctcgcaaggaggcttttgtgtctaatcttgcgggaagcacaatcctcgagatcaatgcagtgacactcgttgcatcagtgagaaacctcaagactttatctcgcaattgatacattctgacctgtgaccactctagacttctgtcctcctttggtcagcgctccagtctcgtctatccttcttcacgccctacagtcctgcagcgctcgcgaccgacttcatcctcaatgtactagccatcttattcgcaacgactgcatactcctccgcaccgcttctcctcaacatcttcctcatctcccccgcggtcctcctattcctcacccgaaacggcctgcgaacaccccaaaaagccaaacctccccgcaaacccaaggccaaaaatgagagctcccaggaggagcagcaggctttgcccattcacccattcttgaccacgtaccgtgcggccatgatggttgtcacctgcatagctattctcgcagtcgacttccgcgcgtttccacgtcgttttgccaaggtagagaactggggaacatctttgatggacttgggtgtgggctcttttgtgttctcggctggagtagtctctgcgcgtgcggttttgaagggccgggactcgaaatccccaaaattagctttgcataagagattgattgggtcggctcggcactccattcctctgcttgtgctaggcctcatccgactgtggagtgtgaaaggattggactacgcggaacatgtgacggaatatggtgtacactggaactttttcttcacgcttggctttttgcctcctttcgtggagctattcgactccttgactacattgattccctcgtatgaggtacttgcacttggaattgcagtactctaccaagtcactctggagtcgactgatctcaagggttacattcttgtgtctcctcggggaccagatctactctccaagaaccgagagggagtcttttctttcatcggatattttgcaatcttcctcgctggacggggtgttggagtccgcatcattcctcgtggtacctcggccacaatatcgcctcagcaggcacggagctctgttctggtgtgcttggttctgcagggaatgttctggtctaccatgttcttcttcaattccacctacgcgtttggctatggtgccaacatcccagtgtcgcgccggctggctaacatgccgtatgtgctttgggtgtcagcattcaacagcgcccagcttttcctgttctgtctgacagagactgtgtttttccccgcggtccaccgtgcgactagcaaggaaagcgaatcagagcagacgtcatttgcgaccagtcggattttacatgccttcaaccgcggtggccttgcattgttcctgattgcgaacctgctcactggagcagtgaacctgaccattccaacattggatctcaacacgccgcaagccatgggcattctaattgtctatgcggcggtgttaactggtgctgctttggggatggacaagtacaatattaagttgagcttgtagatatattggaatacttatagatgtagtattatctaacttaaacattgcatatagatgttcatctgcagggatataaacctctgacgtaactcgagtttagccgcggcatgtgatattggtggagcaacatatgagcccgctccgagagtcacgcaaaccattctgcaactaacactatgcctgtcaatgaacaatcttttcttaattaccctccagcacttgagggtcctaatgtgccgtacaagtatgaagaccaggtcctaccggtcttccgtggcgtgcctctagccatcggcgctacattgtaagctacaggagagctccattgagtgatcgccacatactaattcaccgctgtttcttccagaatccataacatcgggtttatccaaagtcatttctggcgtaatgctggcttcggcgtcattcgtgaaatctctcacttgggccagtacgccggccgctacgatccaactgtgattccagtcgacaatactacccaggccgagtcagcagcgaaagcggcatctgcagttgtggagcgcaggaagggagttcatggatactatacttctgcagactaccgtgcgctctacttgtcgggggagctgactccgaccgctgtcgtcgagacgctattgcctctaatccggcgtgatattcagccgtccgggaaacactcggttgctttccttgagtctcaggtcgagttgattcgtgcagcagcggaagaatctacggagcgatacaagaagggcgagtcgttgggtccactcgacggcgtgccggtcgcagtgaaggatgaggtgcacctcacggggtataagcgcacgctaggctcgaagctggatttcaagcacggtaccgatgcaacctcgtggtgtgtaaagcaatggctggacgccggagctataatcatcggaaaaacttctatgcatgagattggactgggtgagttcttattggtcatcatcgagtttcagtagctagttaactaatactctccagacacaaccaacaataacccgaactatggaacacctagaaacccccacaataaggagtactattgtggcggttcctccggtggctctggatatgctgtcgcagcgggccttatacccattgcgctgggcgcagacggcggaggctcaattcgtatcccgtcgtcattttgtggtatttggggcctgaagccttcacatggtcgtgtgtccggtgcgccatcgcaaagtctcgcgcccagtgttggcgttatcgggcctatggctgccagcatcgatgacctcgccctcgcctatcgaatcatggccactccggcaccagcttcagaggacccgatttcatcgcagttcccctatcctgttccgccggactctgatgtcaaaaggacgaagacaattggtattgtgcgcgactggatcgaccgcgccgagggccctgtgcgcgctgcacttgatcgggcgctcgactactatcgcgagcaaggctacaacattatcgatatcacaattccttaccttcccgagggtcagcgtgcccacgctcttaccatcatggcggagatcgcatctggcgttgatgcaagcaagatccggcagctcacagccccgaacaaagtgcttgtctctatgggcatgtaccaggtcaccgcacaggacttgctcgcctctcagcggctacgcaatctcctcatgacgcatctcgcgcatctcttcaagacccaccccggtctgctcattgtttcgcccacaactcctatccctggatggcatattgacggcggtgaggcggatttatctcgcggtttgtcggatgctggatcatctgtgcgcaatatggaatatgtttggctggccaactttactggttgccctgctatcagttgtcctgttgattatacccctggcggtgtgcctatcggtgtgatggctatgagcgaatggggcaccgaggaagagctgatcgcctttgctcgagatggagagcctatcttggacctgcctagtagttcttcgcccgaggaaagtgaaattgcctcggcaactaagggtctacgaactccttctgatgatctctctgtgtgggaagatattatcgcacaggccaaggagaagatatccaattaagcagagtcaattctaatcaatggtggccggttgatatttttgtcatttattatattccgatgtgttcatttacaagtcacgagacaagcctttccttagtctgaacaatatacgtctccctctgtattttccaactctctctctattcagactttcaaactcccctcattcagtccaacctttgcactattccttgctccagtgccgcatccgtacgtgcatcggcgcaccatcttttgggtgcgacgttgctttcccggtggtatacattcgctcaccctcaacagtccgccggtccactttcaagccctgcagttcccgcagctcatcccattgatcccaggccatctcaatatcaaaactacgtacagtaaagaccaacaccaatttgagcacaacgaccgccagttcctgcccgatacatttcctaggctcaagttggaacccacgccagatgtttttcgccggatgcaacctgtcgccttctagggcggaaaatcgctccggcatgaatttgagcgggtcgacaaagttcgctggatcatggtgaatggtgatagagctgtcgaaaagatcgaacccgtctgtcggccaaggctcgtcctcgccgtttattttcaggttgaatgaaggctgaccttcccgaatcgtgatcgttgctggattcatgcgcagtgtctccttgatcactcccagggtatattgtaacgagtccaggatatgaggcgcttcgcgaatcttttctgcggcaacgcttggatcggagccgagaatcgcgtcatgttcagctcgcaattttgcgacacattccgggttcaactggagttgtctgaatacacggggaattgtgatggacagcgcatcatcaccgccaaagaaaaatatcatcagctggtagaagacttgttcgatgaaggcttcatctgggggattggcggttcccttgcctccaagctcgccagtatactcttcaactgcagaccggattatggttcgtgggctattgctagcggcgtttataccgtttgtgataaacggtcggagatgtttgaagagctggtttctcttacgttgtacgatcagtttgaacaacggggtaatcctccacagaagcttgcgaaggctcagagttatttccatgcggctcaattgctcgcggtaagcgatagtgaaaggggagggatataacgattgggaattaagccgggtatcgctggagttgtcagcgaaaaagtagtgaatccccatataagacgatcgataggcttgacttacagaaccaccctccccgtgacatcaaatgccaagttgctagatatctgctcaaaagggaaaacctgaccccattgaccatcaccactggaaaggcctttgagcacattcgcaaaggcatcaacctcctcgataatagcaggtatccaggttctaatattggtccgactgaatccggggttgaatctcgagcgccacatgtgccactcctccccgtgcatgcagttgaggtccctcccattcgaaatgggattcaaaaactctccttgcatgggagactttggcaagctgcttccaatctccatttgatttgatacatatgcctgtagggaaaatgccatcggtctggaaataggccatacgtcgaggtaaatgacagggggacattgttgctcatttggaaagaatttcggccagtatctgctgatatagaaaccaaaggtctgaatgaagttggcatcaaaggcccagtctctgtaaaattggattacgacgagaaaatgtcctaataaaatgagtgaggcaagattggcttgcgatgttagcttaggattcttttcggtgagataagagatgtacgatgccttgagactggagtcttctgaatttcattcttgcttgatatagctgcacggtaaacctgaatactagcactgccacaaccattatggtaagcaaagacattctctgtccttttcctaaatcactaagcctgggcgatagtagaaacggaagcatggctgccgtttcctgagatgaattattgttgggtgaccggaaggcggtcacccatgtgggtctagatcactagatagctccgctccctcttcctctctttctctctctctcctcgtccatcagatcttagcgaatccacactagttgctttcccttttcaggtataacgtagttagatataccattaggttataagtacttgtctctagctagtaaggactgctagcaacctctaaccctaagtcttttttcctagaccctacttcccggcgcttaacctatataacgcgcgtttcctaccaattagatttaatcctagtaaagccttaataataatagaattagtataccagctcttagtatagctaatagcagtattaactctagggataataacccgaataattagttataatttttactattaggtaataataatatatcttaggagataggaaatacctcttaaccctagactaatataatattattaggtaatagatataataagaagaatcaggctactaacctacctaatatctcggctataaaaatatagaaagttaaagtacttaagtataattctagaaatccttatagataggcgatccctattaagtttactcttatactattaaggctagaatatattattaatagtagtataccttactctactaagggtaacctaaaatttaatagataggagtactagttatatatagtagctagttagctttatatttaggttaataatatactctaagaataaatctagaatctcttatacctcctagaatttactgatataatatttaataaaattatattaatagtataaggctctgataaggctgaaaatatactaaataaaactaaaaagttcgataaaatgaaataagcggactttaatactataaaggaatttattatagaatactagaaataatactatattcttttataatttaaaatttaactataccctttttatatactattataagttctatagtaattagataaagaaatatctaaggtttaatttattattaaggagattagtaatattaaactaaagaaaattatactcgaaaagatagactagtattataagagcctctaggtagtttctaactaagaagggactgctaatatagcctagtccttaagggaatagggtaataactatagtagaggatatagaggataaggtactaagaggggtagtaaaggaggtaataataaaacctccttaagctaagaaaataaatctttaaaggatatatcgaccagaaataacgtacttctgtacattccttatatctagtggtatattagtagttagtagctatatatagcgattatataaatatatactaagatagatctcggaggagaacnnnnnnnnnnnnnnnnnnnttaatactataaaatctactattagtaggtattctaactagttatcctagttatatttaatatatagtcttaattactatactataaactaatttataatttcgctctagctatctatttataggtggtatatagtagatagtttctacttaatccctaggattttatagaactctatctaaaacttagagataaactatcccctttagtctaatataatagttttagggatccctataatctatataacgttatctataaatagatatactatctactttatattagtatctttataataggggattgatattagtctcttacttagttaattaataataataaatactatattatagctatatctatcctttaggaaggaatagaaatctattaataaatactactatagttatttaggaatcagtaataggtataggagactaggtatacgatctctctaggtctttatatatttatatattatatagttatctatatactactttatatctataacctattctaactaatagtatcttattataataagtttcttaagtttcttaattctagggtatatagttaatagttattagtatatcttattaagtaactatacttaaagatccctttcgttagagacttcgagatagtctttaaatagtagtaatctgtcttatactacctaatagggatccgtttcctatcttatagtctaatagaatacttttagcttagggctctagcggttcgctaactagacttattcggttatatctaagttctatatagtcttaactagtagagggagggcctttatatcctatatagattctatctataatagggatatctcgatttctagtattaatttcgttttttctccgaaatattccttagggagtaatataaggtattgactgatatctatataagggctttccttccttaaaagaatatctgcgataatattctgtttcctaggatagtatttaattataaagtagaattgtaagaggaacttactctactatacttattattaatttatctattatactattataaaatatttaagagactgataatctataaggatctcgaaatgttctatataagagagccctttaagttctagtcgctattcttaaagtatataaataatcgcgaggaattccttatccctgattttataattaagctctataggttatatagtctttaagaagaaggtaataggatactaaaaattgttagccttatgatattataagaggatagtactaatgactccgtttaaggtatctgtttctatataggtctagaggtcaggattataatactataggataggtatagttattaacttatactttaattatataaatacttacttacagtccggcgactatttatatactatattatactatataagataatataacagttttaaaaggaaactgtaatccttaataaattgttaatagaagttatagaatcctaagaaggattgtattcccttaattattaatagtatcttctagttcctaataactgcgatcttctctagatctactataataccatcggtacttataataaatcctaagaacttagttttctatatagagaatttatacttagatagtataacctataatcctactctttatagttatttaaggacttctctaatatacttcttatattcttcgagtatctcgctatagattataatattatctataaatataactgcgtagttgtctatatagtctctaagtactatatttataaattattagaatattataggactgttcgtaaggctaaacggagttactttatacttaaacgatctatattaggtatagaatattataagatcttctatagctagtgttaacctaatatagtagaaaccttagtagatattgagctttataaagaattttactttacttatttattagagtactttatcgataagaggtaacgggtaataatctttccttataattatatttaatctttagaagtctatatagaaacgtagactactacctagcttctttactattaagattagtaaagtatatagagctgaactaggaataataaatcctttcttaagattatcgaggatatactattttatagcttttagtttatctaataataatttatagagtaggtagtatcctagctatacttctgctttaaggataatattatggtctacccttaggtaatatagtagtagtttattagatttcttcttagagaatatttctataagattataatattcctataggagggttcgtttaatcttattaagttctatatcctttataatcgtagatttaatatctataatctaatcgattttatagagtaaggtctaaaagacttcgatatctttattaataactatttatatttataaatagttaaatcctatctaaccaataatactaatatctattagtaggagaacttcctttatttcttcttttagtatctctatttaaagaggtactagttcgattttattgttaaggttctattctatcttataatactctataacttactaatacctatattaatactcttttataatagggtatagcttctaagtctttaggtcctactatagattacttaaggcttattttttgaagagataattatattattctatatccttctagtaatctaacttaatttatatagaccgcttaaggattgttataagtataggtatagctaactagcctactaccttattaaaaagggtatttttatctagctagattatataataccgttagtagttaaggaagatatcgttctctacgaactatatatatctaataatcatattatattagcttagatctactactaatataggaatctactactagatctaattatctatacttagtataagaataatagtatatataataggttataataatttactgttaaatcctctaactaggtacttatagtctagtttatagatatataacctaaatttcttactaagtagtataactagttctatattaataaatattaaactatctgctctaatatctactagcgctaagattataaaggaatatctattataagtcagtcttatattaaatactaagctatcttataaacctcctaaaagcttatatagatctagtatatatagtaatacctattttctacctaagattaagacttctcctaggctcctacttttcttaggtctatattatcctctaattcttcgagtttaattatatataattagctataggtctagttagttgtagtaatagcgcttacagctgcgtttgcctttttctttaggtactcgaacgttatataccccttttccttataataaaagtattaaccctcctttataagagtctcttgctctatagctaatagtctagataataaggtagtccctttatattttatatatagggtaaaaccggactagttagcagtagtcctaactctacttctaaatatagttattatatagatatatatagtgccctttacttcctattagagactaatcttataggatatactttagtaactctaggtaaaggtatcgaaaggaaccgtttcttaattaatagtctatataacttaactctataatagatatagaagttttaaatataggttatacttatagttttttttaataactatggcttcttctataagctatataaatttagctaagaagtcggtaaagtcttccttaggttttatcttaagtttatagtaggctgtatatacttctatataataatttaggtttataaagatagtatagaggtagataataatatcttctgtgttagtatataggttatttaaggttatacttattcttagggtaatatatagctatactttacctttatattggctttatatatatagtttccagtagactagtaataggtaatagttagtatttactttgagcttctatctaataactgtctcctatatttcgaaacggacttcctttctatcctttaatattagtatattaggtatctttgtagacttctaactagtgactcctataattagtatattactttaggtttagtttatttcgctctaagtaagaataaggtaataggtaaggttatcgcgcttatatatagcgatatctctgtaggtagtagccttattatattcttcggtagcttggttatattctgttataagataatctttctctatatagagttaatcatattcttctataagtcgatcacattcttctgtaatttatctaatagcttccttagaccttctgttctctaagattaagacctagatttcgttatatattatctagttattatcttcgactatttagaactaattagctagcttaaggaattgttccttactaggagttatatatataatcttatagatagaaagagtcgaaggactctctttagggctattgtatttaatactcttaattaggtcctgtgttttagtaggagtcggggttttaggattagtagcttcttctacgagataatctagtactacgggttattttcccttaccgatcgcggtaatctattatggtaggactataactggtcctattctagttagtttcgggataggtagggtgaaactggactaggataaattgtaataattatctatatagtcgtacggctttagaagtttgggtttagggtgatacttaatattatattatatgctagattccttttaataaaagaagtgcatttctaatcgaatattaagtatggaaaaggaaaagaaaagaaataaacgtaaaaataataaatgggcttttatacccctttaggggcaaagccctattctcgtttcccctagaaggaaggtgcgactgcctgcgcaaacgactaatagtacaatcccaaacgggaaagtatgagtcccacaagtgccaatcgtgatagtatataaggataatatataggtttataggtcatataacctaaggaggctgtataggtagtatatattactcctatctagtctacagtcccccacgtacccaggataggtgctccacgccctatgacagggcttatacctcaggcatcagccttcttagtactggggtcctgacaatagtatatataacgaggtccatatatagtatagttatataactgtgctaagaaatcaggtagccatagtctctaactgatgggactacagtgtagtgatgcaattgaagagggagagagttgtcaattcctaaagggcagaatgcctaactatctagttatgggggttggtgcctgccgtaccgggctgatggtcaggtgaccaccatatccaacacacccccaggtataatcccgaggaatgcactcgtctgtttatttgttatggttttttttttttttttcattaggcagaaaccgtatcgtctagtaaaaactgccattactattattaataaaacaaaatgaattccagtgctttaaaatttgtataacgtatatatactatactgaagtgcaccttatcactgtatcaaggaaatctatcagaaatgcaaggacgattatgtagcccatagcatagctgttgaaactgagcctgaactttgaaggttagtgagactggaatagagatccataatccattggacacaagggaggaccgcttgcttctaggaggaccaggtctgcaatgatacagcaactcttttttttttttttttttttttttattgggtagaaactgtattatccagtaaaaactgctattactattattattaatttttttttttttttttcgatattaagttattttatctaacttttacctcgttaggtttccttattaggtatcttggctattatcttcttccttattggtttaaaaagctcccgcgccagtggctttattagggtatctacaatattttgcgtacttacgataagtttgagtttaataatcccttctctaactatatgcttaataaagtggtatctagtatctacctactttattccttttaagtagttatccttttttataatagatactatattattactatctgagtagatagtaattagtagtttctgttattttcctatctaatctataatctttaggaactatatatactcgcgaattacggtattaaaggtaatatactctactactatactacttctagcgataatttcttctttcttagaggactagctgataggtcccccggtatagtaaaagataaataccttagtgcttttgctatccttataattataatacaatatattaatatatctaattagactagtcgataggtctttcctaagaaggatacctaggtctattatccccttaatatatctattcagctatttaagtgtatcgatatcctcttctcttagggcagaggctcttctctagagtttattaactataagggtaatattaggtctcgatttatcggttagctaccctagcttaccgatatcttcgataaatcttttcgcttcctcttttataacctagggttaatcttcttcgagatcattctctatcttccttatatctttatcttcttttaagttcgtgatatctagagacttatatattatttttattaggagatagacttatactacgctctgtaagccagcttttataataatctcctctatataggcctattaatttaagaatattccgagttttccttaggagaggctgctccctagaaatcgatctaattttcctagattatagtacttaaaggggattttatctttaaactatttgattccttctttatttaataacgcgattagagtattatctatatagagtagaatctagatatttagttccttatagactataatgtagggtttattaactagtggtttaaatcctatcttttttagtacttctgcgattatactatactaaagatagcctacctaccggagtctatatattacttatagaaggaagtagacctccttttcttagtttaggttatttttcttaaaccctactagctactatataaaaataatataattatcgataatcgcgtttagatatactatagtataatcgacctatttaagaaatatattatttacaaccactatactaagaaacagtcttattatctctccttatataattagtatataatttttatcgaaattaatccctagtctttacctatttctatagactacctagtgcgctctaaactcttagactatattctctttatcgatcttaaggttaaagatctatttccttaataggattattactctagcgggtagttacttaataattttatatatcttagctacttttagcttttcgatttacatttctattatagtatactattagtctttctacttcgatactatagcctctatatatatctaagggatcttaacgttctataacttaagttattatcctattagaggtagggtaattgttccttattctagtcctttttcggtagataatagagtaaaacctaccctaaaaggtaaatttatctagtaatccttaggtactagtcctatctccttatctctatttatagtatattataatcctccttctctactctagttatatactctatactttccctattttatattattatagtatttaggtaggtaaccttttatagatcttttggatcggtataatagttatagtaggtcgaggtatatagggtttgtattaacctatcttatttctagttatcttaatagtattagtataggaaacagtgagtttagttctttaaatactcctagaagaggtaggtatatcactagttctttataaataattctagattatagaagtgatatttattaagtaggttaagctagtatctctagtactctttatataagtacttatactctatcttcgagtgattcttcctatagaacttccttatcgatattatagaatagtttagtgtcctctatatttatagagtttatcttagagtcttattaatactcttcccttaggttagtatactctacaattatcctaaggtaaagattttagaaattttttaatagtatttctattactactcttatatttttaaagagtagttctcctattataaattatattttctttactagaaggctatcgataatctcttctcctatcttaatttcgttagttctattatatatcctaggaattcttatttcctaaaaaataacgtctctatatatcgaaactttctttattttaggattatagatatagtaatagtacctattatctcctttatatcctataaggtatccaatctatactctaggatctatctttattccttatatttaagtttcttttagtttatagatatatactttagagtactatactcagagaaacaataggtttattacctcttagtctccttataggtttattacttttctctaagtaagtattaggactttaccccttaaacgagctagtcggttaataatatataccgctatagttactacttcggtctatagttctattaaagtaattcctatattgatatatattatccttactatctatataatatagtaaccactatatttagaaactctgttctattcgtaggtatatagtattaaggtactaacagttatcgatacagtttttacctaaatagtaaaataaaaaaattcctttctattattatatctctattctattaggtagtaaccggtatatcgtttaaactattcggtctatatcttaagagttaataatatattacttttcttagatatatagagtataacttaaaatctagatatattgtctataataattatcgtatattctttatcgattttattatctttaccgattccttttagtttaatagggtataggtcgatataaagtagttacctaacttttattacccttacttactagtcttaggaaatgattttcttagacttcccttttctatataatttgtaatcaaaatatttggtattaatattatatcctagcttatccttattaacttatcctttatagcttcctatatatctaagtctccggtatataagtttagctaagattaggatatatactagaccttctccttctttataatagatagggtaaggcttatccgctagttcgataataggaatattctttataataaacgtataccctattacttattaattactatctttaattactatattattaggattctatcttatcccttaatcctagtgtatttttattagactaaggagattgaacttattccctggcttatatatataatagacgcgtagtttatatcttattccgtttagtttctagattagtaatataatatcgctatagccttctgcgactacttactgtctagtacttgaatcctaactaattgctattcctagtttatatatttcgaatataataaaaagttctctgttcgagtagatatactaagaagatcctaaattaagtatctaatcgatactattctagaggagttatattagtttatttactattactattctgctaaagctctctttatcttatactattactatttctccgaaattgtagtttcctttattagtggttgctaatatagcgatagtattaaagtttacctattatatctaatcggtaggcttcctactaacctattaactcttatttttataaaattagcttaatatcttctagtactataggctaagcttcggcttccagttttatagtctttcgtctactactagatagaaataatcttttatattataaccctattccctatagtaggaatagttcctattagtagtatattatatcttatagtttctctattcttcgatatactttcttatatattttctatatagtagagtattagttaacttagtctttttacttaagatttagcagttattctactatccctttagtacttttattaccgatactaatatactactattaatattaaactctttgaccttatcctatatttctaagtaatataggaagaaatcttagattattatttctactatagggtttttgattgatttaagtttattatttttaattttaattaagcttcgaagttctataatctcctatagttagtttactataataataatcgcttagtatagtggtatagtagcttttagattgttagctatcttaaactgttattttagtatattaataaactctattattattaagaaatctattctctttattccgataaattgaatgattatagcacttagggctctgtgtccttccccttatatatatagcttatacttatatataaagttattagcctattttattcttttcccacttaatataatatatttagcgatatctaggtcgatatatagttatagctaggtactgacttatatacttagttttatctaagtcttagtattagcggtatctcagtctagtctctcgatgtttttatcgattaaccggtataaactataacttttaagaatcttagtcactattctaagctaattatcgaaatcttctttttcctttaggagtagttctatcttatataagacaaagctactaatagctaggagaccttcactctagtctcctattaagtataaggtatcttctaccttatcctaatctttattttttagtatactaacccctataagaggttggttggctgtttatactagtcctatactatttcctagatctgctattataagcgatctcttatagagttaggattattgtattattaaaaaatgttaatctttttctcaatcgggtggtagtattcttagattaatccgtttttgtagggccggcgaatttttgatttatcgcgttatacgttctacagcggtccgtcctaccaattgtattgttttgtctagtcgcgactctctctgcgtgagtcagacttcgttttaattaatgaatgaagatgcctctttactgcaatgattttagcttgaaaagcaggggtcttataacctgtgactccgtcaacacgcgccggtctgtattcactcaagcctactaccggagtccaggatactactggattatatactgatgcgactacagtgtagtgatgcgattgaagagggagagagttgtcaattcctaaagggcagaatgcctaactatctagttataggggttggtgcctgccgcaccgggctgatggtcaggtgaccaccatgtccaacactaacgaatacagtatattagttggcctataaactcaggtatcttatatacgtaaggtctggctgagcagttgtttactagtaagagtatatagttaggataaagggagataccatacctatatatacccagggtgtaccccaatttattattacctaatagtaaaaattgtgattaattattcgggttattatccctagagtcgatactactattagctatactaagagctagtatactaattctattattaattaaggcttacctagatcaaatcccattagcaaaaaacgtgtgttatataggttgagcgccgggaagtagggtctaggaaaaaagacttagggttagaggctgctagcggtccttattagctagagacaagtgctcataacctaataacgcatctaactacgttatgcctgaaaaggggaaaacaactagtatagattcgctaagatctaatagacgaggagagagaaagagagaggaagagggagcggagctatctagtgatctagacccatataggtgaccgccttccggtcacccaacaaaaagtgagggaaagggaggagtagcagcgaagacgggtcttttatgtcggcggcattgaaggtaggttacgtgacagcgtattggggcgctaaacccaaaaaggcaaaactaacctaatacagtaattcacaggtccgccgtttacaatatcaatctcatacttacaaagtacgaacgccaattcaacactccgtatgcagtatagattctccatctcttgcttggatatactaagtttaggtttctagtccatggatatatgcaaacacggtatggatcgtggtatgttcttgttgagccacgtcagatattcttggcagcatgatatccatcttgtatacatccagtactgaattttggtggattgaaaatcctcgagccccctatcttccacactggttcccttgagattgaaactgttttcctcgagtgcagaagattctcctgaattaggaagtacaatttgaccttaaacattctgttttattatacctccaccggcgggtctaaacactttcaagaaacgatcagattttagcagagaacatcaacataatcataggttttaggacatcctggcgttctctttttcgagtatagtgattatttggagccgtgagaccgatgataccaatgaacgtccgatttgagaccctcgtttatgcacgtctgcttcatcttaatcagttcgttggtatagactctcgggcctcgtcgatatctcaatacctagatccacatgggccttttgggagagttgcatgggccatcaaagtctatggggatatctatgtctacgtagtcacaatctatcatgtacatactaaccctcaacgatccccatctaacataaaaggctccatgttaccttcaatatgagacattctctcatacagtcccattttaacaaccagaacaacctaaacctttttacacaagatgcaagtggcatcttcttcttccgctgtcccagccattccttccgtatacgagaccgtgcaaggctacaaggtccccgtcttcttttcgtgctaccccgccggaatcagcattgccgctcgcaaagtcgaagatgcccttagaaaaatcgacgaggaagcatccgaggaaggtacacgggaaagacgtcgagcagtaatccgacacaccaacccctacggtaacccctttactatttgccactgctcggcgcctttccagacagattagttctgttgtctacgctggtcgaagtaatgtggatccatgatggtgagaccctaatgtgctcggcatatatgtagtagtgtgctcacgacggaactatctacagacgtgacagaggagatggatcatatctcagtaagaccactagaagtttgtaaatggataacccattaacagtttacaggcatgccgagaacacgacgagctggcaaaagttcttcaaatcgacattgacccatcgatcttcgaggctggaaatgtgcgccaaaaggcgctggcggtcgtgctccgaaaggcaatcgacatcgaccctaagcaagcccccgatatgatcgagatgctcagaaaatacctggcaacattcgacaacatcggtggcgacttcacgcgaatggaggagtatatgccctaccggatctccaactgcggctactggtaagatctgtacccttctaagaaaatacatggtaaatgtctgttttatcatcaaggatgtcctcttacttcatccgctggggaatggatatgaccctcagtgaggaggactacgccagcatcgagcaattcgacattgcaatggggaatgtcctcggtctgactaatgactacttcagttggaatatcgagaaagaccaggagacagatcgggtgagaaatggagtggtggttctgatgaaggaatatcataccacggcggatgcggcaaagatgatgcttcttggtgttattgtcgaacaggagtccctggctgcaaagctcaaggaggaaagattgaagaagccggcttcaaaggagatcttgcaatatttcgaggctattgaactttatgttggtggaagctgctattggcattcgactgcgcctcggtatcaggtctttgaatgaaggtagataaagacactggtgcaactctgaggtacattttatagaggaatagatttgtctagtaaaggtcacggactttcatcgactatcatctacgtcgaatatagatgcattaaaaccaatcgatggctgaaaaatgaatcagattaatatacaataaatgaagaagacacgctgcatcgaaatagacaacaaaaatcctcctcgtagtaatttcatagatttcaaatccatattccctcaagaggattcgggataaagaattcgcaacccagatgagctgcttcaccatgagcctggagctccctcagaatctgttctccggggtgaggcccatcggtaagattctccttgacatgaattatgtaaatcttcaatccttccagaggagggtcagtatcagcccaagtctcagagtccggacttcgcagaacatccccgaggtccactttaggtatctgaggaagttccaccgactctctcggaagcggacgagactcaacaagtgactcaggcgtcctgcctttatcggcagaggagcttagcgtccgtttcgaacgcgggctcacttgctcgctgccggtctcgagcgggtccgcgggttcgcgcttgcgctttttatcacccctgtttgaatcccgcacttccatgactctgcgggccagcgcggtgagctcggagactagatgtcgtggacacatgtggccgtacagatatgagtcgtcggtgccgtcattgtaggaacattcgatgaagattgctcgtagcttgcccgtggcgattttcggtgcggcggcctcccatactcgtttgttgtgcgttcccagggagactgcatccggctcaacgtcaccgaagacgatgatctcggagccggtgtgatgatcgcgcaggaagaaggcggagctttcgaccgtttccatcactggctctttggatttggatgggagtagatgtggagagcgagcgggggaatagaaactggcaacggttaggaaattttcgtgtacaaattgcgaatttcagcttacctgccatcggtatggtccactgaaatcgcccttgagggaaacatcaagtggtgatcagaaaagacggtactcccgactcgatgaggccccccattttctggatggtatcgttgcttgcaccggccatggctcacgctcaagcattttgtcaataggccattacaagccctgacatagcctctactatcgccacgaccgaaacgagggtttccaccttccaccaagcgctgatatgtgagtagaccagcgccgccatcttcatccgacaagttaggccagatgacatcgttgaacatgtggttcttgatggcggatagcacggatggcaaagcggccacaggttttgggccattacccgcctccaggatcggtgtgttaatcgccagccctgagatatgatctagatgagggtgtgtgatgagaacagcaccgatgatttcgcgaaatacatgcgctgcatttgcctgcgctgttctgcagggcagctcaagcccctgaaagggcccacttgtcatcaccccccgatcatccttgcattcggggagaaaccgttccatcaatcgaataattcctgcaagaagggtacccgcatccacggctaccaccgagttagaagaccatttcgttgacgttgaccggacaagaatgcctgtgacgcagtcttcgcgaggtccacccgtcgggccctgaggggatcagcatccagaaaagaagcagttgcagggctccgtctgctagaacccgccatcaggcaagctgcgaaaagaacattccatcgccaagatatctacgaaagctcgacatccggccctgcacgtgacgggttctgcaacggaagcgaaacaaatcaacgggtcctgacttaccaagacaatgacgtggaatgctgggttctcagccattgttccacttgtcccgcccgtcctggacatgtgagacacgcgataagctagacttgtcacagcccaagagcaagtgaagctgcccgagcgcgtctaatccccaatagtagacgggtcccgacaacaaaatgtttcacaaaggctcaaatgagttggtcgatggtcgaatcaaggatatgagaggcggctaataaagactgaaaaaaaaaaaaatgaagaagagattacgtcgcgatgcgatatcagcgcccacgggttgggattcggactgctcaaatatgtatgttcaaactgacagcgctctgcatatcatgtgtcatgcacagagcggtctatctccaggaagcagagttggtcctagtagggagagagagtgacaggcgcgaagcgacagaaatccggaggctggctgagtgcagataagagaactccgatttcgcgggggtggagatttccccttgtaccacaatggtatcacaatgtggtgcgcaagacactaatgcacgtaaactgcagtgccgattggaggatattttagaaagcaaagagacgttcgatcggagacaccgggagtggacctggtggattctagtggggtatgatctcaacggagccacggattcggaatgaagatctggggtttagtgagatatcagatcaaggggagacgtctgagggcagcatcagagggagttgattttgggcgatgatgttcacactacgattcatacattacacaacagattcagatggctcgagatatacattgttagtgatcagcgtatgacctgtcaatagatctgctgaatttcaagtagatgtacagaattaacataaagagggtatgcggtcaaggacaaggatagcaaaacgactgtgcccttatacatgaattcattgaatgactccccaaaggtaagggatgatatggacacagtccattccaatccagacagaaagcatttcacaaaaaccaaggatctgccttcgccgactgctataacgccttccgtgagcccgctaaataaaacaacaaagaaatgatcagacaaagcccatcatgcgccacaagatatgttcaaaagcaaagggggaatagatgttgcatcaggaccgatcgttggcctctgaattttgttcattcaagtctctctccaccacagtctggtagcttggcagaagttgaccatcatttgatggacagttagggtcgtcagaagacccagaattagggggacattcacgagagacatcactgccccggcgactgccgtcgggactagaatattctgggggcggggcctctggctcttgattctcgggagctgccgcaccttggccctctgtgtcggccaaagcaaaccggctagagccctcgccagcatcttcatgggaaggaatgtgggtcagctgggcgagggaaatgtcagtcggtgatcgagaaggacctgggctaggcgccaggggaatcctaacacttgagcctgaggtcgcgtagtttgcattctggtaaacgcgttgggagatctgagccgcactctcacggccggactcaagtagaatgctgccttgttcactgccatagggtgggggcggggcgaggctaccagtcatgggagccaagccccattttttgacattgccttcgatgaacacgaatcccatttggccaaagttcacatggatagtgcaaggcccgttggcaccgatggtggggaagaggttttgggagcgatagttgtgagccacatcttccaatttcttgccgttgcgtgtgaagaagacggtgccggatcgaggtcggtagcctacaccaacaacatcgccctgaaggagtggaggcccgtatggagtggggttaaatggttggttgagtcggcgatgtcccgtagattggtaggcaactgaggttttatggaagcctagcggttgttagcgggaattcctcggcagaaacacttctgcaacacataccaggcattcggaataggggatatggtttcgtagtcacaccgatgccgatcatagtcgattcaggcttgtcgtatatctttgcctcccagtagtaaacatcattctgcttagggattggcaggttggtctgtacactgcactccgagtcgaaaaactcaatttctgttcgtccttccacgaagcagtttgcaatttccagctctggttggaattcccaggcggatacacccttttcttggattgcgaggaactgcgatagggagatgtcggtttgcacggactcgggagggtttccttggacaaaggctgcagacgattagcaaaatgatcaagcgactcgcacgaaaattcatctccagtcttaccttttgctcgcaaatactccgatcgcgccaagtcatccattgactctagagccacctcttcctcgcgcaagaacgcctgctcgtcatcgtattcaccgggcctgccaatgcgatcgagcataatccgcccccggcgggtatatttgaaaaagaaaaagatcgctagaacagcaaatgcgacggcagctgagccaaatgcggacaagatcccaatcaagatgcctttgccggttgacccgctcgagttgccacttgccagcataggctcgggacgaaactccatcgacaaagaggacagcacattttgtagattcgcttggatctgttgctgcgagagtgaaagatcgctttggatgggtgtcggtgatggtaatatcgaggagacaaagccaatcggtgacgtcgtcgggttgcctattactgtgctcagggttgatggcaggcctgcgagcgcatcggggctcgaagcctcaagaccctgcatcgttcatgtgtcaagtgacagcacaaagaagaagaaaaaaaaatcacgagaagtcgggaagtagtgagtgaagtgtgcaaagaggaggcgagagagagagagagataagtgggcgggatgaaatgggcgggttccaagttatctaagacgttttcggccgtggactagagccatgcactaacaatgcaaggcaatgtatgttgagagttggttcctggactgaagatccgggattctagaatgttgaaagaatctatgtctttgtgtctttgtcttagagaaactaacttttcatttagaaatagctgtgatattagtactccgtatgttgtagtgtcaccgatatgtctatctatccctaggataagcccttctctcctcttcccctctcctagctccttactggaatccctctctcccctctctttataccattccttagattcgaagatgcgtgcaaatagaggtgcccaggggtctacggctcaggacgtcatgatcagttccctcgactcctataatatccgcgtagtgacacctacctcctgcgataaatacccaggtcagtacacttctccctagagcgaacattgcaaggtcggaatgccttcatttgccttcatttgccctcctttactttctcacatacctgtttgctactccaccgaacccccgatcggtgatcgtgagactcgagctgacttgaccgcccagccaagcaccatgcacgtaacgtcgcccggaagcttggagcttcgagtggcttgatctttctctccggacagcccacaattaatctgcgcgactccgatcaatcgcgcccattccgacaacgacgatacttctactacctgagcggagtcgacgagcccgactgcttcctgacgtacgatatcgaacaagacctgttaactctttatgtcccggatttcgacctccgccatgctatttggatgggaccgaccctctcacgggaggatgcgcaagaccgatatgacgtggaccatgtacggtatcagagctcgctcaaatatgagctgcaggcgtggctggacaagcggaagcagggcagcgagctgtacctaatccatgactcagaaaagcccgagcatctaccaaaagacctgcctctgaatgtggaacagcttgggcctgctatggacgcagcccgaggcgtcaaggacgaatatgaaatccgcatgatccgccaggccaacaaagtctcgggacttgcccatcggcgaatcctggagaatatccagactatgtccaacgagtcgcagattgaaggatcgttcttgaatacctgtatctcgcacggcgcccggaaccaggcataccagattatcgcggcatcggggcccaacgcggctgtcctgcactacgaccgaaataacgaacctctcagcaagaaaccccttgtctgtctcgacgccggcgcagagtggaactgctatgcaagtgatgtgacgcggaccttcccgcttaccggcgagtggcccagcgactacgtgcgggatatctataagctggtcgagcggatgcaagaggagtgcatccagctgattcgaaaagggacgcgctatctatctctccacgatcttgctcatgacatcgcgatcgagggtctcctggctctgggcgtgttgaagaacggcacgaacctcgagatccgccaatccggcgcatccaaagtattcttcccgcacggtctaggtcatcatgtcggccttgaagtccacgacgtgtcggagcggtcgatcatggctcttcaccaggggttcgatcagcttcagtatcgcccgatcttggactctacctgtctttcgccgtgcactctttccgccccgctgctggaagagggaatggttgtgaccgttgagccagggctctatttctcttctctggctttagccaacgcgcgcaaccagccgtctgcccggtacattgatttcgacgttgcggaaaaatacgttcatattggtggagtgcgcattgaggatgatattctcgtgactgcgactgggtacgagaacctcaccactgcgccaaagggcgaggaaatgcttgccatcattagaggatctgcatagtgtagtattaagtacgttaaatagcggagatatccattcgtattaggttcaacaggctacaatctatcccgtttccgttgggcactacatagaatgtgagccctatgtgggagttacaagacctggtcgggcacaactaaagaaaatatcacaccgccagttttgtagacttggcagcaagctaacggatgtccaaagtgtcactatacaagaccataaacaaagccagctaagacgggccgcatcgcaacccaggattgcatcgggactcggcaatcctaggggtaggatagatagtacaacataggatatggcacgtaaagcgttacacgagatcgggagatcggcagatcacatccatggatgaattcaaagtggataataacatctacgatagactgaacgaaccagcggagtgcaatagtggcaatatttctcccttgattggaggaggattatggagttaatgtgcatactccgtacgtcaatcttttattcactctatttctatttctgggcaatttattattatcacatttcaccatgttgggtggagaagggtaactatattctatatgaggcaaatatgcaaatatgcagttgaatgtcgactagcgcgtttagaactaaatatccctcatttctttagagttcggagaccgtagcggtactttgtacaattccatgcacttctccgggtatcgctgctcgcatcaacgctaacgtcattgcccctccatagtatagccggatttcccgagtttatcgggtttcatatcccggccatttctcgcacccgagagcggctgtgactcttattccctcatatcttatgtatgttgtacaatattatcctctgttatgcggcggtattgactcatttataattggtttaaatagtataattaaaggctgcaagtggaggaaatacgacatgcagcacagaaaagacgtaataatgatatgtattattatagccgaaagctatagttagaccggtccacactcatttaccagaggaacgtgcccgttgagtagaattagaaatcagaagtcaggtgggctattagaaatggatatggatatcctctttgattgatatattgtatgaatacaaatcgagtctgtgtattttaagcaaaagcaaaagacgagccactccgaactggtctatgaaagcaaacgctcataaaaaaaagactccgtaattccataactgcaaccaaggccgcaaaacaaaaagtgaatgagttttgtcgcctgcatctttgtacatctcatcagcatcagaaaggccgttcccggacgcattttatggcacagtaactggaggtctatctcggacttgacccggagaaacctgcatgggagggagaagaagtgttgtcatcgggtccgacgtgtgaagggccaccgctcgaggatgggtcagacagtgcaggtggtggttgacatgcaggtgattttgttcagtggctccaggtcatcggtttcgattcgcgcttcatattcattggggcttggccagttgtgacagcttatcagcctggtgcagcagcttgtgttgttccaatacgcgttggtgttcatatttcaggagcttgaactggtcgtctagttcatggtgccatgggtataggacgaagacttggaatgccagcgctgacgaggcgactccgaagttgatgagagagattccgcgcgtgacccacatggtggaggatattgagactacttgatcagtaactagcttgcgaatgagtgaataagagactcactgtaaagaaagaaatgtacttattagacgttgggtaaagcgccgaggatgagtgatgagatgtagagcagatgaagagcagagacgggtcttgaagggatataagtaggaacaaaagggggcaaagtcgaattttctcgttccttaaatttgacttgcagccttttcggtataaacataattcgatttcggcaggaaccccgatcagtggacctgcgaatcaacgcccaatccggttagagtggagaaaaagtggagccgtatcgtggcggcaaaaggtttccccgacccaaattcttatctgtcggagatggatcgtatcagtcggatccgaagagataagaaagagcagttcaattaaacttacaactcactgtgtttgtgtctcttggaacctcctaagaagaaattgatcatcgagagtaagtgattcctgagtgtcttggactaagaatactactaacgactgcctcagccttgatcgccctctcccagcctctatacactgtccaagccgaccactacatccaaaatggacaaccaaccgagtgtaacgcagcagctgtttggctgggtaaggaaaaacaaatactcgctagctggcgccaccttcgtcgccagcatggtcggttcctttgtgatggtcggtcgcaacccgcatctgacgagcaaacaaaagatcgtgcaggctcgtgtgtatgcgcagggtctaacgctagctgtcattgtttccttggccgcccttgacatgtcagaccgacgaaagccagcgccgcggaaggaagcggtcaagctggctgatgcatagagctagactgtgatttccagccatcatagacgggggtatagacggggagatatagagatgtcgatatgtatttgtatattacagcctacaacatagaggtctaacaaaccagacaaaatcaactcttagatgcgatgtctaattgttcggtactcaattagactctcaaattatgcatacgttgaattcgtgcatcttcaagtcattgaaagcggtttgcttttgatacgcgttggttgattacagccaagacgaagacatatgcctagtagcattgtcgttatattaattcctcggaccgaggtccttctatgactcagacgaacagcggtatcatcatggcttcggccgaggctaccaacaatggaaggacatggaaatcctatcttgtgtgacggggtaaatagtatccatgataaaggagcttatactttggaaagaaggatgctgtaaaatgcgagaagcgcaaagaaacatgtgagaagtcagccctatttaaagatttgcacgtgtcaaggatgtctatgttgtacaaagatatttcatcaaacgaagtcatagaagactaaagagcaacaaaagatagttagtccgaaatctaaacaacatgaaaccctttgttctattattataattcaataatatatccgagatatccattagcccctctcttccattgctacccgcttagccggacgatctccctttctactgcttattcacagtagtacctgattaaaggggaaatacctcttcgaatagtcgacagtaagcagcttagactcaaagaccgggacaatgatgtcttcgtactcatctccgggtatttaggggctaactatacagtatatatatactaagaccactaacatcccaaagccacatactctgttatttattccatctcattatccactttctgcatattcccaacaatcttctgctcctgtttaccgccccaagtatacgaagcagccctgaattttgcattttcaatccactgatcacgaagtatgaagaatctgtgtaatcagaaagggtgatcactacaaacttcgaccgggcttctcacagtttgccattttgttaacttgcaaggtatacctgatgcggaagttgcaaaacatcctcctgtttgagtggttcggtaacacccaaatcaagaataaaccatcttttaagaggatccggtgaatcgaaatcagctgggatatggatgtggtcatagcccgccgggtgaagtgtaggattgaatgctcgattcaatatattttcacagaaatcttccccaatttcgacgtggcgccgttgggggcaaccgtctatatcggtgatgcaggcgtaaatgactactctggagggatggaaacccatatcaagagtgaagaataaggcgagaaagccgttttgttcggatgttgcgcttcagatgagtttagatagacgctaactatttaattatgaggggttagaatctagatgccccgtggctagtgggttgctgtggctggtcgagtgtggctttcagatgagtgttcatgcaattagatccatgccgccttatgaccctgcagtatgcacaaagaccaatgaaggttccaaggttgatatcgagagaaactttatttcaagaggacttgaaacgcagagggaaggagcgccgtataggatcgccgagcagagacacctcccagcttcaaggcatggctaggaacatcttgacgtatgcgatatttctatatgattagtctgatccatggcatcttagtatgactgggcagtcaaacctacaccataaatgggatacgaataagagcagatcaaaggcaaaacaaagctgaaacaggagtataccgccatcatcgatgtaaccgaaccgtgaataagcggcgccgatgattggatttatgtcatcggcgccgatgtcggagttggtggggttggatcttgaaattcacacccgcctttatattctgaagctccctacctgtaatcgagtcaatcattcctcttgatactattgcataatggcttcttacaatattgttgttttcggtggtgaccactgtggtcctgaggtatgtcattggaacattgaacgctcgcggggaatcgaatacaggactgacatagaataggtgaccgctgagggtgtcaaggtaacattgcaagctggaattgggaaagcgcggaatagatgtactaattgaatcccagatcctccgcgtcattgagaagtcccgtggtcttactttcaacctgcaggagcacctgctcggtggtgtgagtatacaccacctacgcgacaaacgccaatgactaacaattacaggcctccatcgatgccaccggctcacccttgaccgacgaggccttgaacgcagccaagaacgccgatgccgttctcctcggtgccattggcggtcccgtacgtctctattctccccccccccccnnnnnnnnnnnnnnnnnnnnnnnnnnnnnnnnnnnnnnnnnnnnnnnnnnnnnnnnnnnnnnnnnnnnnnnnnnnnnnnnnnnnnnnnnnnnnnnnnnnnnnnnnnnnnnnnnnnnnnnnnnnnnnnnnnnnnnnnnnnnnnnnnnnnnnnnnnnnnnnnnnnnnnnnnnnnnnnnnnnnnnnnnnnnnnnnnnnnnnnnnnnnnccaccccgcacaactaagaacaagcctactcacactgcatacagaaatggggcaccggcgccgtgcgcccagaacagggtatcctcagactgcgcaaggaaatgggcacattcggcaacctgcggccctgcaacttcgccgcgccctcgctagtcgacagctccccgctcaaggccgacgtctgccgcggagtcgacttcaacatcatccgtgagctgacgggcggcatctacttcggcgagcgcacggaggacgacgggtccggatacgccatggacaccgagccctactcgcgccacgagatcgagcgcatcatccgtctcgccgccaccctcgctctgcaacacaacccgcccctgcctgtctggagcttggacaaggctaacgtcctcgctaccagtcggctgtggcgaaaggtcgtcactgagatcatggagaaggagtacccccagctcactatcggtcaccatctcattgattcggctgctatgctgatgatcaaggacccccgtaagctgaacggtattgttgttaccagcaacttgttcggtgatatcattagcgatgaggctagtgtcatccccggctctctgggtctgcttcccagtgctagtttgagcggtattcccgatggcaagagccgtgtcaacggtatctacgagcctattcacggtatgtgttatgtcctctttgctgctttctgccattggttctggtggctaattggttctacaggctctgcccctgatattgctggcaagggtatcgttaaccctatcgctactatcctgtccgtggccatgatgatgcagtactccttcaacatgatcgacgtggctcgcgtgattgagcaggctgtgagcaacgtcatcgaggctggtgtccgcactggcgacatcggcggcacagctaagactaccgaggtcggtgatgccgtcgccgccgagctggagaagctgctcaagtagatacaaagcagcctcttcgatgtttctatatgagatatgactagcatagaaaactaaaaatttcaatacccggtttaaaatgcaacatgtatttcacgggcgaaaatatgcctaatgatgttcattcgccggcccaaacccatgcaatcaatgcaaaataattggtatcatgaagacaatgaaactccgataataaaacctccgttggcattttacaaaccaaacaatgccggtacttttgttccttcaaaaaagcccttatcgaatcactggctcacccatccaatccggctcgtctagaccggtggtagtaaatccagtatcggcatcttcactagcggtacgtccccgaagatcatgagctccacgtagggacggacgacggcgccgagcatcagcagaagccgacggcgcagcagccatcttccggcgactatcatcacaagcaaagacctggaatccacgaacatgagtatcctttccgttctgatggttctccatgatgcgcatctggataaccatcgccttgagcacattcccagaatagggatcctccccatcgtcctggctatcgggctcatcaatctcataaaacggatcacactcatcatcatgctcatggccagggtcatcacagttccggtacacgattgtgcgccgacgcatactagtcgtagatcggcgtttcgacttcccagtgtcgttgcgcacccacccaccgtttcgaccgccgacgccctccagcggcacattgacccagccgcatggaccgtcgccttcccatgttgcgaactcgatgaggtcgttcccgcccattcccgctgcgaaaatcatcttggtgggcgtgtagctttcgtcgagctcgaaatccaggtatacgcggatgcgcacgactgctaccagtttgaagaagtggagggttaatgtgtgtggttgtggtccgtcggattgccagtattgggccggggaagggttgcggagggccgcgacgccgcagcccggcttggaggtggagacggtccaggaagcgagcgatgagatctcacgtaggttgggtggtaagggggagggtgatttttctgtagcgcgagaatattagcttgcaatgaatcgtagctgtgagggaacagtacctcgatcgtgcatctcttggtcggggtcctcttcgtcgaattggtcctcggcttcgtcctccagttcctcgtcctcaatatcggagtcatcaaattgcccttcaatagcctgatcgaaggaatcgtcgaagtcgaggggcccgtcgttcccaagctcttgcatgttgtgcccgcgcgggtcgaaatcatcgtcgaagtcgtcgtcatccatcatttgtggtgggagttgctctacccgtgctcttggtcttccaaatattgtaaaagggtttattggtgccgctggatgtcccgccacggcaactgggtcgggtgtgagatcatttagaccggtggaggggggttggtgtcgatgggttgggtttgtgggagtgtgacgcgtgggcggggtctggaattgggcccggaggtttcctggggcattgtcttggttgggtcttgtgtcgcgcggatttggttgtcggcgcaagtgaggcatggttgttccataagttttggagttgatgtttacgcgcagatcgaggggagctccatttccgtttacggttagcgccatttggaaggcatggggtaaacaacagactatttgattcaaatatgaatcctactaaaagaggaaagcatgtagaatgcttttccgtgccatcgtcaaccactggaattatatcgtttatcgtgtcaatgaatgcctttatttctagtttgcagtttgacctgtgctatctattgtccatgcagtttgcgatatataaccacatgtatgcagactatctagctaactccccctttgctgatagctagtgccttcacactcttatgagaaagtatgggccttcatagcgatatattgtctagtgggcctagtaggttcaaattcaaatcgcaagactataaagggcttcctaaaagctcactgaaaccccatgagacattataggacaagctgtgagctgtttgatttgctagcaatgcggcaaaatgttctttatctttcttctaattaaggtttgcaaggtcctcttctgtgtatctattagttacaacaccaaacagatcgtcaatctcggaatccagacggccttcgcgaacaatgtttcgaaagccatccaaataaagcagccgcagactcccagactggaaagcttcctagtctgcaaggatgagatacgtcctcgtggaaagtctgtgtaatctcatcgcaaggctctcaataatggcatctcgtccctcgcgccattctccaggggtttgttttttcacttcagcaaattgggttcgaaccccaaacgtatatcatcacaacacaatacccctaccccgggccacggaagcgcggtatccatttatcttcaaccccaggagaaagcggagcagcgatttccgcaagaacgttgtatacgcagcgccagtccggcccaaagttaaagtgatccgcgttatcagggacagcccaccgggattccgcttcaaatgggtctatgtcgatccatgtattcatcaattcatcgtgctcaggccgctcgtctgcttcggggatagtatgtacgcagtgagacaggggacatattatctgcgcgctatcgaagggcatcaacacggtaaggccgaagaacttagaatagtgccgatttcctcggccgtaggcgtatgagacggatcggcatgattctcccaatctcctccataggaataaagttcaggtcgagaaacccggtgactagtttgctcgctattgatcgagggtttcggtcgagagtaattccatttacgtcaagtgcaaggaccagtcatgtcctccatgatgaatatcggccgagagcctgtagacaaggggtgacaggtcagtgttaacggggcaatgctcatgtggctgatgttattctgaggctgtgcttttacagtggcgataccgaagtaaataaatcagtgccagtagtgattttcgactatgtcaacagcaattactccgtatctatacctttgataaggtctatttagtaaaggtactctttcatatgggtagcagaccctcatatcgcgaggtctgtaaaattcgtaaaaatatgtaaagactgatttagtctcaatacaataatagaccgcatactccgtagtccggatgtccttgaccgccaactagagattgacacggatgataaaccgaatagtgattcaacggtagtatcctagtgcgacaacatggtatccattatagctcgcgtcgcaggtgccaagttccaatccaacacgttcatgacatcggtgtgtagcatttcgtagtaaaccgggatatctagcagcagcactcgcagcactcgaagcaggcgagaccagcgcagctattgtgagaatgtcagccccatttcttattctggttgagtacggctctctaggaagcttgtaagacttacattccacagcagatatcaccaccttcaccgccaccgcggagttccatcttcatggactcggggttctaagggctgattagtggtgattccagcgaataataaccgaaatacatacaggttgctgggagacgacgttggtaggagacatggcctgggtgttggagggctgttccatggccatagaggccgcattccaggtaggctcctgctcctgggtgggcttggactcgttggaagacttgaaccagccgaacatcttggatgattttgagaaaaggggatatggagaggagattcaggaggggaaggggaagataaaggggaaaggcaaataagccggggtcagccgtgtttctactgaaattaaagtcctgcctccgcgctaagaataaactgaaaactctttttccaggacaggcaaccggattatgggccggtggggtagtcgggctgaggtcggcagaagaggattaccggcttatgcgctggcttagaggctatgcttagcacagctgaaatggaaagcgaggtgacttgttcatgtgttggtttctaatttaaaatgccggtaagtaacataaaaactatataggaaacattggaagtccgtgtgaaatcggacctcgaggatggagatacaccaagcttttggtcaagctttacgacagcttggcgcatttcctttcagccctattgttctatgacgtcttcgcgttggtatggggtatctttaatatcgaattataaacatgttaatggcctcgatttataattataagtctgcatgtctactaaagtgaaattactaaattcagaaaggcagcggcgcaagcacaaacctaataactgaaaccaaataaacagtcacgctctttcgacatcacatcaactatccatgccaatattccggtgcatcttgttattctatacggagtatacaaatcaacaaaatatcaagcagacagattcttctcataatgatcagctaggccaaatgatgggcccccgagcaggatattcagctcggcctagtccaaataacgtacacgcggacagtaattgatcggcctggaaacagccagtaaagatcatagtcccaaggctggataacgttgcactcctcacccgctccatggataaagcgttccatcgtgtaatctcattgcagacaacgaacagggtgatgcccagtttgcgacggaccatggtgttcacttcttgagagattatctgggggctaccgtcacctgtgaaacacatccttcgtcagcgctaagcacccttggacggtgtcccgtcttcgcatacggtaagggctgttctcaccgccacgccgacagtaatgtgtgaaaggtaaaagttccaacatcttcggatattatgtcattttcttcaagccagaaagacatcaactatcgctgtcaattccagtcatgggttaatggttaagaaactactccgtacgtactcgggttgtaataataaatgtggaatgtattggtctccgtaatgaaactctgagtgaacgcattacccataagttggtcttatggtctagcggtcatgactgtggattttgacatcttgtttggaatcttccaccgaccccggttcgaacccgggtaagaccttttattcttttattttttttcatcacaaatgatccattctagcgtctattgtcgcacttgtctatttcaaatttagtaactttgcttcttaactatacagaatagaccttgtgaaacttatagctacaatccctgtagagttgttactttttgcacttgagcgaacattccccgtttattcttctacactcgctcatatatttcacgcctaaattagctgtatgaatctgtgtgtgcagatcatgggtttgcggaaagcacacacaaaacgctgatcgcttgcttactcttccacagaattagaaagagcgagcgacgggttaacagaacaggaaggaacgaccatcctacactaatattttctttcttctgtcttgtgaatatatttcttattaactagtcacctgacaaccaattggtcttatggtctagtggttatgactgtggattttgatatcgaatttcaaactttccatcgaccccggttcgagcccgggtaagaccttttctattttatttttttgagggtgctagtaatttgatgcctgaggtggaaggcagaataaggcgggaatctaatcctctataactagttaaagagaactgtaaataattcaatccagcgaacttatcgatagttacaatattttcggtgacatgggaagcattattttccactgtactactaattgttgtcaaggacgttgacctagaactctgaacattggtggtgatccaaggagactaacatatagtaaaacaactccggtcttcttcctatattgagggccattcgagaagaaagacgctagaggcattgtgagttacacgtgtagtgtggactgcggggctaagtatagggttgcatctatattttagtctataatttctcccgaaaatgcattagtatccaaaagataactattggtcccttcagctatcgtcgccctgctctatctttgactcgccaagtgccaaaaatgaccagtatgatggtgcgggcacgagtttctcttggggttttaatataggctacccaagatttcacgacactcaaaatccggtttgttggaagccgaggttcacagaatccttggttggagatgttgatcccccactgaggccaaagcgcggtgttagtgttacctcacttatgattggggatttatataactaaatatgtactggatatagtgcctaatgaattggagcagcctaggataaactccatgacacaatggagtgcatctaacccacgagacttgaaagatccccgcactatagaatgctcggccctagatcgtctcggccaacactgcaccgaagacaccacattggatactttataaagaggggttgtccttcgctctcgcaacccccaaccactacacaaatatacaaatatacaagatgtctatgaccattgaagactgcacccaagaccgggagggcttccctcgtccatttccggatacgcctaccaatgttttggagcagtttaaaatgaacggaaaggtggtggtcgtcacgggagctgccgatggacttggccatgcgatagcgcagggtatggccgaagccggcgctcatgttgccctgtggtataattcgtaggtttttcttcatccaatgtatgtaatcggttaaccatatcaacagaaatgacgtcgctatcgagaaagcccaggtcctagcaaaggaacatggtataaaggcatccgcctacaaggtcgatggtaggcgggcagttggagcttcatatctatagaaggcgacaaatgctaagctttatctgcagtttcggagtccaatcaagtatccgagacgattaccaaggtcgtggcagatttcggcaaaattgatgtgttcgttgccaatgcaggttagtttccgcgggttgatgtatggcagatagctgattgaaaaaggcatggcgatctccaagcctatcttggaacagactctagatgagtaccgaaagcagatgtccgtgaatggtatgaaattgttaattcggcgagataagaatgtggtattaaccaggattagttgacggcattgtgtattgtgctaaatatgctggcgaggtattcgcgcggcaaggtcgtggcaatctcatcattacctcgagtatgagcgcacacattgtcaacgtgcctactgatcagcctgtgtacaatgcgaccaaggcgtacgtcactcactttggaaaatcacttgcccgcgagtggcgggattttgcgcgggtcaacatcgtctcgccaggcttcttcgatacaaagatgggcgccggtccgttcgccctcaaggaggcataccgtatgtcgtcactaggaaggcaaggccacgtgaaagaaatcaaggcattgtatctgtacctcgccagtgatgcatcgacctttatgaccggaagcgatgtgcttattgacgggggatatgtcttgccatgagacgtttaaatcaaacgaatttgcaacgagaggatcaacacgagttggtggcaacatgcaatttacatgacggtactacgtactgatccaataataaagaattggcaatgaactattcaacgtcgggcacactccgggcacactccttgtgcccgaaggcgttttgccccgctatctattttcaggtaccgtttcaataccttttgtttgatcgcaagagcataccgagcgcagctatagcaaggtcaatctaaatcgaaccttatctcttcccgggtcagaggaacgtgctccagttcaagctgattccctaacttggaaaccaggcccggaattctgtcgggccccgggggatgggaccgtttatccgagccaacagccggtcatgtccgggagaacagtggagtagaaatgagtcaacgactcgcaatgaggcgccggggtgcagggtcagcaacggccgatcgtaccggattggcaacaggatcgaactttttccaatgccgtttcacaactggggctatcagacccgaggaatgtcttggcatggtcattggaataggcgtcaaaacacaggagaaaccggctagtcgatgccagggatgcagggtgtcgtcagctacacagcaatatcatataaaatgatataagccacctttttgaaacacggcagacgaagcggacaagacggagaaaacctgcttttggcttattggcatcatgtgattggctgggtagcggcccggttggagatctccttgatacgcacagagaaagcaagtatagagagaatataaaaggatcgaaaagaaaagaattagctgtagctgcggcgtatataggaagataatagagaaaaagaccgaatacagcagaatacagcaggctgtctccagaacatactagaatatactagaagtgacaataccgtattgaaatcggtttccccacgttctatcacggcccgaagtgacttcacattgcgatatcacctgcgatttctgcccctcctttcttcctctgcccagaccacccgttttctcttttgtattttctcttgtcatctttgttttgcttgattttctttcatagcgctgccatccggtgcagccaagtccaaaacggcataattacagcaattacaccggccattggtgtcggctcgaattcgttcccgatcgcccatcttcatctcgccatgactgatgaacgggatttttcctctgaggatgtcgcgcctagagccgacactctttctcccagagaccccacgacccctgcgttcccccggcagacctcgagccccgttgtcctcccctcccgcgaatctttcggagctggcctaacttcctcatccacacacctggggcaggtcaatgctgcgcgacggggtgttgggacacaacctaaatcgtcgatgagttcacaaggaaccggtggattaaatcaagatattatggcaaaaatgaaggcattttcgttatcccgtcaaggtgctccacagccacagactgctgcctcaacggggcagatccccatggctcaaggaggcggtgcaggcggcgcattttctggaggcatgtccccgatcgctactcgtccaaatcctcaaaattggtcctcttcctctgccgtctccgctcctggctctatgtcgcctcggcccggagggcttgcggcgaagcgcatgaagccgggtctcaagctatcggatgtcaccggtccatctaatactccaggtacagatcaaaagcagggggaacaaaatgccgagtctgcctttagcaaatactccgagttcatcgatacgaaggagggcactctcaacttcaaaaacaaagctattctacacggaggtggtgtcgaattttcgtcaggccacagcttcaagatttcattggatgaagtagatcgcttggaagagctgggcaagggtaattacggaacggtctacaaggttcgacactctcgcccgcatctacgaaagccaggccaggggttgggtggcattgttagccgtcctccaggcctcgccgaaccgactccagaatctgggtcaactcaactctccggagtggtcatggccatgaaggagattcgcttggaattggacgaagccaagtttgcacaaatcattatggagttggacattctacaccgctgtgtatctccattcatcatcgatttctacggagcctttttccaggaaggtgctgtctatatgtgtgttgagtacatggacggcggctcgatcgacaagctttacgagggcggtgttcccgagaacattctgcggaagatggctctgtcgaccatcatggggttgaaatcactgaaagaggaccataatatcattcaccgcgatgtgaagccaaccaatgtccttgtcaacagcaagggccaaatcaagatctgcgattttggtgtcagcggaaatctagtctctagtattgcgaagaccaatatcggctgtcagagttatatggcacctgaacgaatctcgggaggcggaatgcaacaatcgggagcgccgagcgccggtacatacagcgtgcaaagcgatgtctggagtttaggcttgtccgtcatcgaatgcgctatgggccgatacccatatccaccggaaacattcaacaacatcttcagccagttacacgtgagtactccgaaacagttttccaagttcaatattctaatcttgtcttttaggctatcgtccacggagatcccccaacactacccgagggcttctctgaacaagcacacgcattcgtcaaggcctgtctcgacaagaaccccaaaaaccgaccaacttacaacatgttactccgacacccttggctggcctctctcatggagccaccaaccgatgccccaccacctgagtccggctctggtgatgtctcttcatcggccatgacagaggacgaagaagtggctgagtgggtgaagaagcaaatgaaactcaaggaagatggcctgctaaagatttccgagaaaccagcacttcatgctgtcgcgctggatcaggtcggcacgggcccttccgagggtgttccactcgctccgtcgcaagatgactgagctttcggctatttcgaacattgcatcctccttttctccgggggcactttcacggcgcaggcgctgtttaccacacttgcatctctattgatttcaccaggctaatgcgccaatgctctggcgtttgggatccattggagcgtgggcagaccctcggcatggtcattacccgcgtgtgctttgagactatttggggaaatcatatacctggatctacgagcattttctgaactgcagtagagataatttgctgcgcccgcccttcatatgaccaggcgcgaagaaacacaatttcatacatgttacctgtcctgaatttccttctgtatctaccttgtaaacaatctggatttttggttttcgtagatgcagccactgtagtgtatcagtttttcaattgaaatttcattttgatgattcgctagtaatcagttcataagtacatatcgctaaaagccgtgttgaaaacagatcatatatatacatccccccgaggttcttattgctgttgaaattgaacaagaactctctcaatcggaatcccctcaagcctctccccaaacctcatccgcaatctccctcaccagactcaacttcttcttctgatcctcgagaagaagaggatacccactctcatgggtgctgaacccacactgaggactgatgcaaacccgcttgagcgcctcctccctagtctccccagacccttccgcaacaaaatcagcagcggagtaaacccgctccttcatagcctccttgtcctccaaatcgcgcaacttggtactgataattccgacgacaacattcttgttcttcggcaagaactttaacggctcaaagccaccagcccgctccgtatcatactccaagtagaaagtatcaacatccaagtcctcaaacaacttcttcgcaatgatgtcatacgacccctcggagaagtgccgtccaccaataaaattgccgcgacacagatgaatccccgtatgcatatcagccggcagcccagcaagcgaatcattgtacagcttaatataagcatccaacagatcctccaccgacccctcattatctgcatccgccgcccacccctcccggaacgcagtagagcagaaatacgccatcccaggatcgtcgaactgcacgttccgcaagccggccgcgtacagcgacgccagctcggcgcgatacaccttcgcgacgtcggcgaagtactcggcgtcgttggcgtaggcgtcggccgcgtacgcgcgcccttgcttgtaccgcatgtggaaccacgccggcgtgatcatcgtcagcttgatgttgggccattcgctctgcgggagcgacgcctgcacgagacgcagctcgtggaggttggactgcgaggccgagacgctgtgtgagagcttgctgccggcgattacggagtcgcccggcattactttgcggtctttttcgatcaggctgaccacgtctgggtggtagagtctgaacattgaggattcggcgtcttggagtcggattgttcctggtttttttgttagtgtgtttttctttgcttgggggaatatcgatagatagatagatagatatataggatagttaggtatagcccggatattagtatactacgtaccctcgaactcatcccacatcaacccccagaatcgggtgcggttgtactcgccagacgtcacggccttgaacccgagctcttgctgcatcttgacgacatcgcggacggcttcttgctcgatggcggggagtccggcggcttcggcggagactccggtgttggcgatcttctcgcgcgcctcaagtaggttagctgggcgcaggagtgagcccatctgctcggcccggaagggtggggcgcttttaagctcgttcgccatgttttttgtaggaaaagctacgcttgcaaatccaggagagttgtttggtataggattattccagggaaattttagttttagttttcaggggacatccctctcttctctatgtgggggatctttttctgcggggctgctaaaatgtggtgctaatggggcttctagtagagcggctatctgagcaccacattttagcaccacacaataagaaagatcccccacatggagaggataggaatatcccccaaaactaaaatttctaagataattatataccaaacagctcttcccgggtagcttaacgaccagaaggtcgcagttccccgagggagacagctctgaaggccatgatgtagaggatatatgcgcgggcgtacattctcccgctcggccaaaagaccattatctctcgctctgacatacccaggaccaatatatatagtagcgcacaagctattggtgacagcagtctttatataccgtagcgctcttcccgaataagagcaaaactataactgattcctagtcttcggcaaagcccgagtcgggcccagcccgtggcccgacccgtacgggcttcgggttgggtcgggcgtagagcctcaagactttgggttcgtgcccttagctactcccacttctgtatccgtggtcctatcgacaatctgtggctagagtactcacaagtcactagtacgctgaaccaaatgctggtctcagaatctggtggtcctgcaaacgtccacctccagtggggagtaatccatgatgatattcggacagagagctgtacctcatggggggtttctgtgaaagccactcagcccatcatgccgtttgaccctctcgttcgtatggctgctcagcaagagcaatatgtgttgcatccatcctctgagagtgcaaagagggctttctcgaactttgcgacgctgactgacaagacgttgaaccatctttgttgctatttataatccaaccctggctatacggtaattaggtaacgcatgacctcggagcaacaagcaagggaaaccagccagctataatgtgtatgcatagtcactttctcaccctacttgaagccagatatatgcatcacctttgatatttgaatgtatgacgcgcttctatactccactatgcctcgattgaataacaaaagagatatagttgtaaatgaagcagtgatctgtgactctaacagagccttggtagtgagtaacctctcttgtgagattgtttggacagcaaaagcggatttttgcggtagtcattcgcctgaatgaatacccccctcttgtaccaggaacatttgaatcacctccaggatcacgctgttcgttcctgggagctgctagccgtctaggagcgcccctaggggtagcctaaccgtagaagtgtagggctgtagcgaaaaaatgtgctgaaagaggaatgaaagagtcgaatatggtctaaatactcgttgctaactaggtgtgaactgctgatgtcagccgttagcttgttggcactggaatggatagaaaacaaagtaggacatttgttcacagggccaggatcggtaacaggaatggctggctcggacatagccacctttccataagtatggggtcttcaagtcatcgtgtactccgtgtaattcggtgacggtaaattacgcaaaggagtttagtatgtttacccccgtgatctgagtagtgtattccctacagaagttaaggaagaggctttctggctagccctttaagtcccgactgggacatcgaagaagtgatctcgcggatatcttgagacacaaattcttcgacttcgtcgttcaaccgcccccaaagatagaacttattgccagacaggaaaattgtgtgccatccgtaatcatcctccataaccggctgtcctggttggagaccatagtctcgagcaattacttgaccttcggagtcggcgcctatccactcttcctgataaagaggatttgatgggttcgaggtccagccagggggatcagtaaactggcaatccttagcgacgtgaccaaaaacaagagggagttagcctatacttactggtggcagagcggaggtcttcgtaggtgacttgacaggcgagaccgccacagaaggtggagtagagatcctggatggaggcattatcgcaacagtggacatggtttcaggagccggcttgtcaggattgtcagttggtgaagggattaagggcaggtctgatgtaattatgtagtttctgccaatccggaccgccaccacgtcaatacaactctctcctttctgcttcctgagcctacaacctgtagaagagagggaagcgatacgaaggggcatggccacctgagcatgctgaggtaacgactacgcgactaccttcactacgccatgataggaaggcggaggtactggcggtgaaggggggtggtcacggatctttgcggtgccactgtgcattgtatcttaggcatcaacttcactaatcaccatctcggtgctcttatcgccgttaaattcaattgattaattaacctatcgagataaaataccctaattgtattattcagctaggtaccctctttcatatatcccccttagggccgtacgaggccatatcgattctccatgtttttgagataaccaatcaataaagcttcatatattcaaacagctgctatataggcggtttcaaaaatagaaagatacgacttactacttaaatgcggcctcttcgagggtagttccttctaggaggaaagagcaaggtagcaacattaggcatactataccttcctagttgcaatgttgtttcatgttacatgccattgccggttcctttcggaagaaaagagtacaatcgattcaaggaagggaaagggaaaatgaaaacagtctacgatctcgactgggttttgtgctcttcctggcgacctcgccacaaaccatgcgaaccccgacctcgcttacggtttaggaaggaacgactcgattggcaagtgcgaggtcgaggttccaggttgggcaggtgcgcagtcggcatcagtcggcagatcgtcacatttcaaacaattcaactcccctaccagcttctcaatgagaattctaagcaaatacaccacattctgctcatgatcatggcatcggcacctgcgtcagaacaagtcctgaatgcttttaacgagattcttaacttgacaagggcttacacttatgatcgccagcaggcaagtgaatcactaacagctgcttaaattgcatgtttcaatccatcgagatcttctaaattcctgctagaccccatttggcacgatgcagtcccctattggggtctcttcgatatgctcggccttttcgtctccatcgttggagttgcgccgagcggggctacaaaacgaaatttctacctcccactaacagcaatgtatgctaattggtgtaatactcttgcggcacctgttccaacgatgtataattgcacatggatagcgtatgggcccggtaaaggtacattctttcttggggcctccttaaggtgtccgttccccccacagcattactggaccgtggaatgaggtaatccaggaagggcgatttgccctgatcaatgatgctgccatgattgagagtggcaacacaatgaagaactgtcctgagcaaagagagaatgatacgttcattcgtttcggaaattgtgccgagacatccattcgttcatctgttccagtaagtcaatattccagtctttaacgatactctacgacgcgaaaatttgatctaactactagataggcacagtagaaaccccgctgcagttcacggaattgcgcttcaacgtcaaggagttcttcccgcaaattacgaggatagcttgtccggcagtgtttggcaaaatgtacgaccactctgtgctaattgtcgagagctgactcagatgcggcgtggatgtgtcgccaattttgatccattggctgatgcgagcggcgcgccgccttgaccattatgttcctaagtttaagtaactaactaacggaggggagaggttaagtgacggtgtattgggacgcttaatcggaaacgacaaagctgaacggatccagtaaatcacaggtgagtctttctagggtagactgttaagttaaataagtaaatacgtaggtttggtctttctagttattactatctggtcgaccgcagaatttattcccgggtatctcaaagaccagaaggtcgcagttcctcgagggagatagctctgaaggccatgatgtaaaggatatgcctaggcgcatattcccccgctcggccaaaagatcatgatatcagagcgagagctctgacatgcccagggccaatatatatagcagcgcataagctactcgtgacagtaatatttatataccgtagcgctcttcccgaataagaggtaaaactataagctaataactgattcctaggtagtcgtcggcaaagcccgggcccaagatctcggcccgtggcccgacccgcaacccaaatggcctcatgaacgggccaaaaccaacaccttgcttggcgagaacgaaatttcagattggcgactcggagccgaagcttactatcgtggttgcctatcatgttttagcccccaatcatttaagatcctttctatgccgttatggcccgaattccattcactgctgcagctctctggcttaataaatccatatttctttgtaatatcaggtggttttggacaccattacatattcagtgttgactgtggcagtactagtagaagagaaaagagtaataggaaaagaaagaaccctattgtctaagataagtgtgtaaaagtgctgctgagtactaaataactagttaactatttaattgataatcttgtagcggtgagagagatatgtagaaggttagattcctacaaacgatcgagatctagctaaatagctaggtgaagcctggcaaaccaggcaacggcatgtgatcggcacatggccaccacaacagataataaccataactaagcattagataaagtgggtaactagccgcctcaagactttgggttcgtgcccttagctgcccccatcgacagcattctctcactctccacagccctttcaatatcacatccatatgctcgctcttcaacatattctatagcctacattcaattataacgtgtagtatttgattttcaattctacctatatatgcataagtgggttatccggaatatgcatgccgggtcctccggatcctgtacaacagtctaccctacaaagattcacccacaaccacctccacttatattttctagctcatacatagcgtggtatacaattcggtatctctgcagattcaaaatagtatatatccaagcgatggcgttctcaaccctcaattttatatagtagggcccccgagcatcactaactgcctaacatctatctggcatattataaattgacaaacgcaatggttgtagaatatagaagagagggattagacgaactcgatataatacaaaatacaagcttaatactagagatcaagattaatgggaatatgggcagagtgtgggtgaatctttctagggtagactgttgtagcgggaatccttgaatccttcctgccacctcacagcaaccatctcgatcgagattagctggacggctataagttcaggaagtgatcccctcctctcttcttttcgttgatcacttcccagcttctctcctttcctcttttctttcctaccggtcagcttctctcctttcacggaaacaaagcaaagaaaaccaccgaacccaaacgacatcatgagtgactccaatgtctgtggcaagtgtggcgcgaggcgccgtggcgaaagcaaagattttcaattctttgtcgccaaatcagtcatcgggttcatcactatgactgcatgcttcgtgctgatgagactgttcttcctaggtgctcttgcgcagcctatgagtaatcagtctgatatttcgttacccgccatgggtaatcatagcgatcagctgagcggtgttgatttcacactctacgcagtcgacgcctcgatgaacgaacaggacgctatacagagctattacagtgccttcgtcaatgaaaccccacctgtccgaaaggagctggtacgactgtaactaccctggtggtggcatcggacttgcttgctgcggcacggcgcatgggattggcaactttgtctcttcagtcggctccggctcagcttcaggatacatcgttactctactcaaggaaatcaactctgccagcaggctcgatgagaagccgcgttctgcgtacatcacgcaggacagcagcaacctatgtgtgtcgtgggcgacctatgcgacgagcaagatgaccagcgctgaagagacagaaatatcaaccttctctacggagtgcgggtcaaaaggctacttttgatagccaatcctcacgacagattcctctctgcctagttcctcttgtccaagtcactcaatacatgtttcgagttttagccacaatgaaaatcgtctcaacgatgattgatctggagcgctttgaaaaaaatgcgaaaattccacacctctctacttttacagatttatcccgttgctcggcgaataccagaacatggcgccatcaaatgtgatgtggctaggttaaggaaccaataaatttattggactagcataatggaaacaagaaagcatttcatctcaagacccaatcggcattatacaaaattcctgcaatgaacaaacacataccaatgagatgaattgaaaaactgaagcaccacaggccagctcaattccaagatgaaattagccaacacaagctgtaaaatcaaagaaacttgccaataaaagaaaaaatcattatcacaatcccctcaccttacttactttttctcccctaatcctagactaccgaacaacttgtcaagtcccaatccgccaagaaggccattcaacaaaccacccagcccgagaccaccgagcagttttccgaccaaccccagaacaccgctcagcagcaagcccacagcggcaatgatttggaaaagtggctcggaaaggagggcccagagcggattcagctttttcttggcgtgaggcatgtcagctatgcgtttgcggccgttctcgatcgttttggtgactgtctcggtcagctccttgagtaggtcggcgagctggtactcttccggggtagcatcacgcgaggcagcgcgcgccttagcggtggccgcgatgcggccatcggggtcgagggcacggatagagccattacattcttggaggatacggccaccttcttccagaagaggtttaacggcttggacgagcttctcttcgtcgagctcttccttaggtgtacgctcggccttttcgatttgctgtagaattgttactactaagaaagaaatataagggggaatatgaacttgcctcagtgatctgttggcaaacaggcttaactcggtcgagggtctgactgagaatatagatcatcttctcagctatctggcggtcctgctcggctttagcctgagcctctgcctcttccgaggtaagatcctcttcttcaggctcaggttccggaatattctccagtaaggtacactcgccaatattgttgccatcgttgtcaacgacatagccgttatcgttaacggttttgccaaccagtgttgccagattaccggaagtcagtttaccaataaggttaccatccgtatcgcgtacctcaccctccttagtgatcttgcggccagacatagggttgatatcgcgctgcttctcttccggctcccagcgttcggccttaccgatagtatttccattcttatcaataacatcgccgtcctcatcgaccttacggccgaaaagatactttgcatcgccttcgataaggcggccgataattcggccttcgtccacaactataccgtccttaccgacctcagctttatcaaagccgtagaactgcccctccttctcttcctgctcctcatcgggtatcagccctgcccggccaaccaccttaccgttatcattccagatttgaccctggctgtcgaccttacagccagcgagacgttcgccttcaataacccgcccaaagacaacacccgtagctggatccacgatgttcccctgcttattcacaactttgtccttaagaatagaaaggtcctcttcagcggggggttcttcctcgggtggctcataaggctcgccacggcccctgacattgccatatttatctgtaatctccccatcttcgtcgaccatttggccacgcaattttttggcaaccccctcggtaagtcggcctacaatagagccgttgtcgtcctcgataaacccgtcctcagtaacaaccaggctctcgaagccggcgaacgggccatcgggaatatcttcgcgctcgtcgtcaggaataagctcagcgcgaccgacaatatttttgccttcataaatctcgccgttctcgaatatcctttttcccgccagctccttagggtagccctcaataatgcgaccgatcggaaagccctccggcccgatcacatacccggccttattgcagctcagcccttccatactggaaaggtcaataggctctacctgaggcgattcaggttcctcccatcgttctgcacgcgcgacgacgttgccatactggtcgagtatttcaccgtcctcgtccactgctctgttgaccagctttttcgcgtcgccttcaatgactcggccgaccctcgtctggttctcgtcttcgacccacccgtcctggccgacgaccaggccatctaggcccgcgaatagccctccctcttcatcatcgtagacgggtattggctgggccttgccgatcatattgccgcggttgtcccaaaactggcccgaggcgtcaagctcggcgccaagcttcgagagcttcttaggatcaccttcaattatttcgccaacaggcttgccggtagtttcatccatgatgtagccgcgcttgttgcacttcagaccctcaagagactcgatcgacggtattcttttgttactctcctcggtgtcgtcgtgagcagtctgttgctgttgctgttgctgctgctgctcctccacggggaacaactccactcggcctatggcgtcgccttcatcatcgacgatctctccctcgccattgacggtatacccgacgagatcctccggatctccctcgacaatcttgcccactgccaggccagaagaattctcaatcacgccaccctcggagacaggcagcccatcgagttcgtccagggtggttaccacgtccttggcctggtccagctccgagttttcctccccagaaaactccgtagattgatcaaccgtctcatccaatatatcaacacggccgatcaaatcgccatcctcgtttagaatctcgccattgtccccgacagtctggccaaccaagtcttccgagtctccctccaccacttttcccattgggttgccgttctgatcgcagatttggccacccttggcgacctcgagacccttaagcgtagaagaatcaggcgacacggtgctcgagtcagtgttctcaccctctcgcgctatatccttcacttgacccgattggctcctaaccttctcgggccgttcggacacggcgcgcccgagtggggccgcagcgccagaagcttgagaaccatcgtccttgggtggggagataggacggcgctgctcgggtgcaccaggagattcctttgtagactttgagaaaggggttgcaggcacggctgtttcttccctgtcatccgagacgggctcggattgtttggtttggagcttgcgcggacccgtttttttcttggaattgaggctcattttgacccgacgtaagggaggatctgaagaccgtttgattttcggttgtactcagtatttactttccaccaaaataggcagatgagaattgagctttaggaatatgcgatagtaaagaattccaagtgattggggttgatcctttatggtgaggttttgctgtgataaactagtttttgcaatcgaaaggcccattgtcttgcatcatagtgacaccaaacaattgtcgccaaagagttttcacctaagctgtgcatgtcatataacaagcgtaaaccgtccgatgtagccaaaatccactttatcacggcctggtttgaatccaacacgccgaaccaagcaggctatccggcgcattgaagtcgagactttgtttaaccaaggctctagatttctttttgaattgaacatcttggaagtaatacaatgacgaagttggtgaatattctagccaaactcaagcaactaagcggcatttcattgaactgcagagccccggtgacgtcggcggcaacgataactcatctgacactaccatcaccccgatgcagccattcgttgggagttcgctcttccttgacctaaatcctcaagtgaaatttggatgggcagcaaaatcttaatgtagcgtgacctggtcgtttcgattacagaatctatggtcatggtcgccaactttccgaagccctcggcctacagaatggctccctggtgatgggcagacatatttctccggagcaaagaatatctcagaaagaggaagaggaataatatcaatattctggtctctttttccacctcttacccccgaccagtcagcggcaccgaggggtagccaatcccctggcttctactttagagcaatacgttacgatttatttgacgactggttaaaggtgcgcttgttgacgctgaatattgaagattggcgtgttagccacgaaccgctttcatcggttcgatgagctctgattatttccggttattacttgttccaatactgctcattggtagtctaaagactatctataccgtttcattggatactgactgcttggtcacattctaaaatacaaactgcaatcaaccaaggatcgatatattacaccttccagcgacaaagccacggctcaatccacattgcctaataaaagatactggcacctaaaaggcgatgatgaggaagaaagctgcgctgcctgcttgctgtttggctgacgtagttgggccgacagattggatcaagatgcctattgaatgacaatgagacaaaggctttatggccgtaaggcctaccacccagttgtcacaatacataatgctcgatgctgtgagagtcgtgtgcttatatgttctcttcgcaacactcatgtgaattccaaggcaaatgagagcgaggaacgaatttgacaagattgatgcaaaagtccacagccgtctcagctggagcccggagcctagttactagtgccagtcagtaaaaatgtcacaaaacattgaattgtcaaaatgattctctgggtccccaaatgctggtagaaaagaagggctcactgacagtaaacctatagtcaaatcacctttaatcttcgcctttagttgaatctcaatatccaaattgatatccaaacgaagacgcaactgctcgtcacgcccgccgtcatctttttcctctttttgttcttccttctgtccaccacccaaggctccgccgactgccttacctgtgctgtcagtcacgccgttcatggccttatcagccgtgttttgcaccaactcgcccgcttggtccacaccacccaggcccgaaagtgcgttgctgccactgcgcttctgcggttcttgctgtggctggcggtgacgccgggtgcgttggcgctgctgaggctgagcctggggttggccatctatgtcgctgcggtggattgactcgacatcggattccggacggtatgagcgagcgggatgggatcctcgtctgcggctatgtgtctgttcaagttcgggttcaggctcgggctcggccctttcttcttgctgttcctcttgtctatttcgttcttgttctggctcttgatacgagtcggagtcttgcttggacgtggacggcttcgtttcctgcttggtgggagcttttttgcctagcttgcgcggcgcacgcttaggcttgttaggagaggtcttcgattccgagctaagggtttgaggttgggtttgttccaggtcagtcattgtggagggaagggatgaagaagaaaataagaaagaggttgaactatgagctagtcggatggatacgatttgcgttaatagtacaaacgttagtgggagtaggtttagatgaagtatgatgcacatttgtaaaatatgtgctactcatttgcactgacattactccaaccgttctatattatcgaacagaccacgggcgagatgggacaattgggttgtccgacgtcaggggtggtggcgccgtatttatcgggagaggagttggtaccagacaggtttagccaagaaaagcattgagaaaccagctgccgatattacgaccggaaagcaaaaaaaaaaagcctgcgaaggtgtatagcggccagtggccgaatgcctaatgttgcagagctgatgccttaaatgcctgatttatgccgcctataactactgtgttttgtaaacggaaggcactattgtcttaggggctaatcctgataaggcagtgtacctcttggcactctatttccagtatgcatggcattaattatagtctcgctacctcttatagcagtggtatcgccccctcccgtagaaagggcacggaggcgaccgcgagcttattcttaggatacttcgctacgctagagctaggccgggggaagatagtggataaggttagaggaagagtaagaatactcgaattggagggagatggaggtttgtatagtaagaacaactttaagatcaggaaataaataaataaacaaatatatacggtcggaatatcttcaaactaccaagacttaggcgaacagagacttacatagtaggaatagctttattttagatgctctctgtcgttgtaatccaggtatttgccagtataaaatcaggcaaaatcaggcattcgaccgctggccgctatacaccttcgcagctcctcgtgtaacgaaccaaattacatggccatcccatacagcatgccatcattgccacttttcactcagtcttttcacgtctttgaccgttcggaaccttctcattactctgcctgccttcaaccaattttcttaagctcaggtagccttttctcccgatattcctaacttctttgcaaactccgaaacagattttacacctgccgaatcccaaaagatgggatcgcttcctcaacttttcttggcacaggatgggaatcaaagcgagatccctatgccaatctcgggaaaatgaccactagcggaatttcggatctcgtcccaatggtctgcctaatagtgctagtgccagagccagaaaagcctgctagccgattatcgagcagccgattttgatattgatgataaaatatgcgtcaaatcaggaagccaacaaagtacaaatagttgggcgaaatgaggatacatgggtttacaaggccctagttaatactagcctgattgatgggagacgcaaatccagaggtaattatatcaatcgtatgactataaagacaacagtattatccatcaattttagaatccaaaaaaccaaatccacaaagttgtaagccgtccactaatagcatcaaaaataacagtctccttcactaggcgttgttgagaccaagtgggttgtcctcatcctgcttctgtcccccaacaccctggacggtaccctgcacagcctgtccagcatcctcggttgtatggccgatgccacctgtcgcaccggaggcagtatgcccgaggccttcagtggctccgccggcggtctttcccaggtcgtcgaccgtgctacccaaggtgtcggtcacgccgccaactgtcttgccgacggtatcggtcacaccgccgagggggccttctaaccaaccatagagtcagcgaatactgatattagctatatggtgttgaatttggacatactgctctcgtcagacatatcggcgattggtaggtttcgtatagattcaagaaatatgagtttgaaatgtacaggttggaaggctattgagactaggctctccgcctttatatatcggttccatccacaacaaatagataaaagccgggtttatgacacatggtatggttgggtgcaaccccaagcagcctgaaattaccaaagtatatagtgcccacaccaataacaagctaacaagtggttatagggagtcccatttgtcgtttagtacatgacagccattcgatgtagaccggttattgaaccgtgttttatccgggtctctaccagccatcgaccctactgctggtggcgctgagcaaacgattattggaactctctggttgcccttgtaattgtgtcttcgtcttgcacgccgatcagatcaaaaacaggaaaatcttcgccacaaaatatttccggtttgtgaaattcttaaatagatagggatattgataaataatcaagtatggctctatgaaaagacgaaagcagtattggatgaagggattgcttgtgacgacgtcaaattttcgttgtgcaggaattggtaatggagccaggatggttgttcatgccctgttgtcaaaaaaacaagatcaactcctattcaattttgagcagacatatttgacgggtaagaggggagggaggaggtgaggtgctttaagagcaggaaacttacaagagagacagggttatgtcaccgtgaatactggccttcagttctatctcaatatccaggtccaattccagcctcagcttcaaacccttctcatctagaatcgatttatccccctcatgggaaatctccatgccaccgccaggtttctcttttgagacttggttggtaaatggctgcatggcttggccatcgtcatcagaatagtcgtcatcgtactcatcgtactcttctgggctgttttcatccccatccatgtattcgtcgtctttctgttgttgaagaggacgcctccgttgctgcagcacttgcatattcttagtctgtggcgcttcatcctcatattcctcattggtgtagctgtcggagctgtagtagtcttcatcatcagcgtcgtcgtcctgtacggggagcttcttttgctgctctttgggcttttcactggtggccataatggatgcgatggctttgcattcgattatagagagaggaaacgtgtatatgcgaaagcagataggaaatcaaatcttgaacctgaaaaagaaaaatcaagatgtgatatgcaataatcgcacgtagggaaaacaggaggacatatcgtcgatatcaagtctatgcggtgtgcaatgacgttgccggctgtcttctactttgctccaggcccaaattactctaatgaggactttagatgtgccagctgcgctgtttatcattacattcgtggcattgcgtgttgagtatccctggatctactgaatccaggcaattgtcggttagaatacccctttcgtttggtcatccaggacgggactaaattgtactgtgtgatgggtcaactccatgcaattcctccgtgcgtttctgcctatacctttttggtcgggctggtcgctttgtatgtttgatactgactcaaccgaagaaacacggcaataccgccctctacgtcgggggcggccaaaaatgtcccatctcgcctggctatgacggcgtcctgcctggactatgcgatagaaaaagcctaaatctgcggatgacattgctaatcggtttgttattggttcccgtagacgtcatattatggctcttggtaatgacatgctgccgattagttaactttagccgacatgttaaattatgtagagttggtcattgtttctattccatgatttcgactcaaatttgtgattcaatgagcgtcggtattgcagccaaacgctagttgaacctctgatttcgatcaccctgctcgaaataactcccatacattttcctaactacatgctcatattcttctttcggtatatcagctggattgtcccctttgaaaacaatgcaaacttctatctatcaaacaatcttgctgatgcaaacaagcaaatagatggcgagtggatcgtaacagcgcgcgccacagccatttggtggggttctcaagcctaatggctaatgcaaagtgaagaattgtgcaatcgagtacctagataagggctgtaagacaaatggtacaaaatggctgtggcgagataatatagacctggtgaccccgagcttcttctacctgcattcctccaaaagtcgatattgccagcctaattcactctctttaaccctttccattcttccgctctggattagacccctcatattcgacaatatcgttttcacgctttcccacagaggctcacccgccatttctttgcaaaactccaaagttgattctgataaagtcagctaagtggtttcacccaaattggacagaggacatatgacaggagcgcaagtcggaataatatggcagtgataatgtgtcggcacaagagatgctatactcctcttcctctagccttcacggcagtgatgactggtttcgacttcacgggacaaaagttggacattgatcttgtctcgttacttttctagatttaataagtgtcctaaaccttctttggggcaactatctactcactgtttatgtagttcctacgattatagatttcagttttgtctcgattagccagagcatccactaatgctctaataggacgcagcttttatgatcctggatgatttgattcaggttgtattctcttcgctcagaagtgctgggttttcacactgtagccaaaccttaggctgtctgcactcaggtgcaagctgaatactaccggcattcaagcacctgtatattaatgatgagcttgcggtctcgctttatcggaaatctgatatgctataagagcttagagatcttaggtacttacctaagaaaaatccagatattatagttgcgtcggacgatcgactcccgttggcatctctaggtcgtggccgaggactcttcttgtcgtattcttatactgtgagactcccttatgctgtaaaatattgttaggccctgattctattgctttgccgtgactacgatttttcttacaagacttactggttggctattctaagctatatgttagattttatcgacggtacggatatcttgtatgaaaacaagctgcaagaaggctatagaaagttttaccgtgccctcaaactagaagatcctaagatgtggtcaatactggatgagctccgactacgcttgaatgaagagcgtcgcctcccagtaatcaaagatttataaaaccgggttaatatgatctatacaactctatgtctcatactgccaaacaagaaaataataaataaaaagggatcacaggtaggccccccatatatattctgcattcgcgcgcagtgcagattgaacaccgaccgtcacaaacaacacgtgatgtcccaatagcgtagtatcaaaagcgtcctgcatagcgacagccaaaaagcctcacatcctatctccataacgaaggacaggtaaaagaaaaaaaaaataggtagcttctctttgattgagcgtgtcatccttagtgcaggggccatgctaatcttctctgtatattttcatttgaccatatgccccgaagggcgaaaagacttccttaaagttcaatataacccgcgttcgggggcagaattgtaccgcctaccggttaggtaaggcacgtgggcggtcatatacattgttatacatgcccttgctgtcggcaggttgattggacgatgtttgttgtttgctgtttgctgttcattgctatgccgagagaagatcagagaattaccggcaccaagatgacaattgagcgtattgtcagtcgcgcatgacatcgatccgggaactctgtgcgaaacaagtcttcgaatttcttgatgatgtgtttgatctcggcatcttgtattggaacgacactagtctctctcggcatagtaattgagcagtaattcacttcagatgaaagagagtgcccatggaatcagatgaaaaggatatcatcttgtagcggggcagttttgtgtgggattactcagcactgcgctatgcctgtaggtgcggggtcatccaatgtcgaacttagggcttgggaagtatagaagtcacaatatctaacacagtccctgttaaggtcaagtccttgaggattggagagattaagatgatctcaacactacgactgaatttctggttaccaagaattaagatatacttcacttccttacagcctagcccaagaacaagattaatcatataattgcttcgcttcgctccgcaataaatatcggaatcttctagtattattcacatatatatcttctttttctcttcttgaaaagcattaccgcatggtcacaagctcctcggcgctagtagggtggatagcaacacagctatcgaagtcctgcttagtagcacccatcttgatagcaacaccgaagccctgcagcatctcaccgacgccaagaccaaggatgtgcagaccgacaaccttttcctggggaccggcgcaaatgatcttcatctcggtggggttcttggccttctcctctggggacaagccgacatcgtagaacatggcagtgaacttggtgtgataaaccttaatcttgtcgtcgccgtagcgaatgcgggcctcgggctcggtgagaccgacgcagccgacctcggggtgcgagaaaacgaccgtaggaatgttctcgtaggagatcttggagtgcttcagctcgacagggccgaagagacggctgccgagttggcgaccggcagcaatggcaactacagaacacagtcagtgcatttattcagacgaaaagtggaaataacgacttaccaggggtcaactcagcttgaccggtcacgtcaccgagagcgtagataccctcaacggaggtgttctggtactcgtcaaccaagacgtgattcccaagattcagcttgacaccagggatatccaagtttaggtcttcgatctcgggggcacggcccacagcccagaggagctcgttgacctcgatctcagagccatcgtggccaatgagcttgagcaggcgatccttgcccttgccatcccgaatgagttgcacctccttgaaaccaccgtggctgcggtgaagcttgacgccggcggcctcgtagcgatcagtcatagtcttctggatcatagggtcgaacttgcgcaagaaggtctcgccgcggatgaacatgtgggtctcaacatcaacagcgttcaggacaccagcaagctcaacggcgatgtagccagcaccgacaacggcgatcttagggggaagctcttccaactcgaagaatccgtcgcttgtgataccgtgctcggcgccgggtacggcggggacgctaggccggccaccggtagccaacaagatgtggggtgcggtgtaacgggcagtaccggagccgtcggccagcttgacctcgatagtgtgaggctcgacgaagccagcacggccttggaccaggtcgattccctcgcgaccccagttgccctcgtaggcgccgttcaaccgtttaatgacggcatcgcgggtgttcttaaagtgggtgtagttcatagaaacgttattggggatgtcgtagccatagttctttgcgatgtgcaacgtctcattgatggtcgcaaagttccatgtcatcttcttagggacacatctgaatgttgtcagaaaaaaaccgtcaatcgagtagaacggcattacaccttgtactcaccccacattgacacaggtaccgccagaccgcccgctttccacgatgagggtcttcttgccataccaaccagctgcgcggcgagcgcttccactgccaccactaccaccgccgaggacgatgtagtcatactgatgtgtttcgacgggagccatattggatggttgttggttctcaggggcggatgacgaagaaaagtgtcgagagattgtagagagccgagagttcgtagcaattgggttcgcaggggtgaagcgagtagagttgatggtcgccagagttcgattggtcaaacgaccaggacgaatttgtccgacagaagatcgggtcagagatgaagaggctcgaaagctaattcgggaggattggatggagcgggagagcatggagagaggggaggaggggaagagggaacaattatatacaggcttaggtgagaggggtcggaaaagacgtggtgacgatatcggggttcgttaatgcgcattggttcttccgtcaccgcggtcgatttctcagcattgattacgtgatctgatctagatccgggacttgatacttttgggatctacactttgtttacacggttaatatgtaatattattgaatttgtggattgtaggtatgggtataggaaattcagcaaagagcgacagggagtgaccagcactccacaattaaagtcgatgcagcacacaaggaaataatatcgatcagaaaatttacaactcagagccagggttgaagcactggagtaagtcaagacttgatggaaaccaacaaaggccaatgaatgttgagagatttttcagatagaaaagggccccagccctatcaatccaaagagagtaacagtaacggggaacagggtatcaaaacgcgatgaatgtaaaaaaaagccatcgagcccatgcttatatctagactccatgtcacaacatgctagagtgacatggccagtctctggggcgagggatagacggtagttggggcgtgggaggtggaagagtgtgttcgaatatttgcgtggacagagatcgtgaaggtatcttctgatgacttgcagatcacgcaatccacacaatgtcatgacatgctaccctgctggtcacattttgcatgcgacagaggggcagtcttcaatgttaaaggcagtgtgaggatcggaggagttggactcgtatgttgtattgcgagacgaggaaacaaagtaagagtgtttcggtaggaggagaggcatccccgactcaaaatccaggaccacggggatcctttcaccttcgtctgggcgctgttgaagcagaacgctatcgcaagaggacggctagtgggtataggcgataacggcaaaagagatgaggcagaagcagagaggtatgtagacagagcgttccatatcggctggagttgaggagttgcgcttcatgtttttcagtatataatagcacagtgatgtggtagtgaattcggagatctgaaaaggagggggtccgggagtatgaagagtccggggagggggtggtgttatcttcttatctgcttatgtaaccgcgttgggccctcaacaaaacgtcacctgactcaacattggatgacatttggccagtcaacaaatagaaagggggtgtcctgatgcccacagtccactattaatctgctggacacgcaaccatatttgatgatgaagccccgtgggctgttactacttagttggctgacaagtgagaacatccaagtattccacgtggtactaagcctcggcaggtcctcgattataaagtggactgggaatttccaagtttgccctttccaaggttgtgcgataatgcatctgaatcgtctatatatagacggttttcgatctcctgagcaatatataggacagcctctcctcgtcttagtgtgtcctcatactccatacaccccttgacggtccccatttgccaagggtcggtcgcatgagctcataaagggcacctagccaacctcaacagcaacgatctacattactactttgcccctagccatacttacacatttaccaaagaacagcccctgtccagcgtaatccataacactccgaaacctccacattcacggagaatgaagaatgcaaggagatactaaaccacacctcctatccaccaatgaaagcaaccatgagcggccttcatacctggccaaacaaaacacaaaccaagaacgcgccttgccggccaatggagcaaggcatctggcctctcgagttctccttcgtagtcctgattaattagacagaatcttgccctagaatagtccgggtatacatgagccgatcttcccaaacacgttctcatcacctcaatatcacgccaacgatcttctaccagctaccatatcatcaccgtcataatgcgtgtttcagccctcgccttcgctgccattctgtccctggtctcggccaaacagatcaatatgcactgtaacttcgccgaggaccacaccggcatggttcagcagccctactgctgccgtgatttggtacctgcacggggaaactcgaaggcaaatgaggcattggactgtatgtataacaatctcgggatatttagtcactgggtttgtctaacggtctacttttctaggtgatcaactggaccagcctcagctgtgtgaagatcagtctcggccggcttgctgctatactattgtgagttttgttccagtcaagttggctttcggagtttgctaatctggtttcttctatttttctcagggcccgaagaagatctgtaccggccatgttatcttccaggatgcagaggatgtttagagtgagaagggtacgaaggcacagttgaatacaatcgctttatgacttggcatttgacgttttgacgtcaataatttctcgtgaatagacatcgaacatatatcacacttcgcttctggtgcttgaatgaaatgacggtgtactataacatggcgcagtctagtaggatgtttgacaaaactttgcctattgactaaaagactggacccaggagacagcagcataggtaaatcggtcaagccgtataattaattgcatgaatcaagtaatgctagaataacgagcgccaaactccacatcccccacgcccaaggtgctatacatagtcaaccttttataaatgcagccacatcaatcggaaattaccccaagcatctcctcggtgttcctgcgaaacagacgctccgctagccccggcttggtcgcacataactgcaagcaacattcggtgaatggactgatatcgacacgagagaatcgagtgtgtggccaatcagtggcatagatgacccgattaggtgcaacagataagaactcgcgtgccatagcctgaaggtcacgcatttgatggtctttgctgagtctatacggtgcagacaccttcacatacgtgttcccagcgcgaagcagagagattaaggacgagaacccttgaaggttatagggattgaaagctggaccatcatcgtccctcgaggcgagctcggggctgccaaaatggtcgatgcagatgcgcactcctagtcgtgggatgatcgcctcgaccatcgagatcatcttgaggggaagatatatctcgataatccagtcgtggagccgggcaagcttagcatgctgaagtaaggtctcttccagctcggtcttatccatcactttccctacagactgaaggttgattctcagtccacggactccaagagtatgccattcgtttaaagtctccaatttgacggtggcagggtcaaccacgacaacccctcggccgcgcgagggcccaagtcttcgcaatgcatctaataaacatgaattgtccgtgccatagactgacggttgcacaaagacgagattctcaacacctagtccggactcgaaggcaagagcttcgggtaacgtatgtgcggtgggtttatataccgccgttgaagaaataggaaaacgctcaggttccacaacatgcatatgactatcccaggactttggaggcagtctctgcttcagcgatatacttgcggacgagacatgtgttgaacgccgttgctctaaccgggtggaaaggacatcaatcaatatcgatggaggcccatggagtatattgggtttggcctgagcagtggtcagcatcctgaatagatcccaagcaaatagagagggtaggcagagtatagaaaaaagtcaaaaatcaagccctggggaaatactcacagaagagcaactccggcaaggcgatatcaccctaagaaaagacctaggaagaaccatgctagtttcaccgctcaacgtttgtggacgttgatctaagtgcctgcactgtaggggtgctgaaataaaaagcacccatcggataatatgtatggattacgacgtgtaggcctcgtacgacccacccccctagcacccacgcttgtggccagttgcaggggaaaatcgagctcggaagttgtccgtcaaggagacgctttcaatccgtaagcagccatctgggcctgttaaatgagctgagccgtcaagcggagccaagaaagtggataggtgcggcatgatccgacattgaaaaatggggtcacttggaagtaattgtaatgcgaaaaagcaatactcacggagtagagcaacatgtagttagacaatatgcagaatatcaattatcaggtaattagtgtcctaatccttgtaaaagaggggtgaaggacaaagtacggacgttggccgaagttctatttagctcggatgccgagctcccggtcttcctctcatgtccactcccagataacacttcatttgctccccggatttatcgaatacgcccccacagctcgcttatacaatttaagggcaatgcgatggacgttaaaatggtcgaccaatccctattacgccctggtgattgctgtcattgcctgcggcgggatcccgaaaggtatgaagacccttccctgcccccaccactagactggcttatcggacaatgatttgcgataatatactggtagacatttgctgattgcgcattatccccgacaggctatgacgaaggtggctatagcgccagtgtctccctcccctccttcaagtccgactacgacctcgctaaacacccggggttcgatgataccgagctagcaaatcgaaaagcgaacatctcctccttcaacgtgctaggtgcagcacttggtgcgctgttagtccttgatctcaatgatcgacttgggcgcttggtggcgtggcgcttagcatgcgtcgtgtgggcaacggggacattgatccaggtattcgcatccggtatatatggactgctcttgtttagtcgcatatggggcgggttgggcgcgggcgctctaacggtaactgcaccactatatttaaccgaaatagcccctgctaagacgagaggtctggtggtggggttatacatggtattcctactggcctttctggctatgggtaagctttgaccctctatacatcctacattgtatacatatccggctcccaatctgattcgctgcgctttcttgcaggattctttatcaactatggtgccagggtccatatggccaccgcgcgaactcaataccgcctcgttcaggctgttcctttaatccctgtcggtatcgcatatggtctgtcgtacctttgccctgagactcctcggtatcttgtctcgaaacagcttcatcagaaagggctggaggttctggcacggctacggggtagggatatcgatgatcccgaaatcacaaaggagttcgcaactattgatgcacgagagcgagagcgacagacagacttagcatatgtctcccattgggctatcttcaaggagacacagatgaatccgaattacagacagcgcttctggctgctaatgaccatgcaaactattgctcagtggaccggcgggaacggcatcacatactacgtaacgagcatattccaggtacgtcaatttcaacaagcaatcatcagctataccaggcaacaaaccgctaatatatacgaaacagtacgccggcctagaaggcgactcaacgtcccttgtctcctccggcgcatacgggatagtcaaactaatcttcacaatggctttcacatggggtctaatcgacctcattggtcgacgccgctgcaccctcgccggactaagcctgcagctgtgcgcacacatctacatgggtatatacatgggcctgcgcccaggctcggaagacaacaaagccgcctccaacgcagccgtcgcctcggtcttcgtctacgccgtcggctggtctatcggcctatgcacggtgccttacctgtacggtacggagatcttcccaacgcgcatccgcaacgtcagttacgcgattagcatggcgctgcactggttcttccagtttgccgttgtacgagtcacgccgaatatgttcgtctcgctgcacgtctggggtgcttatctcttctgggcacttatttgcttttctgggctcatcattcttggtgtttggatgcctgagacgaagggtgtgccaattgagcggatgggggatttgtttgacgggccatggtatctacgctggcgggctaagccgagggagtgggatcttgcttcgccgactgatacgctggagaatgtttcatcgaaggacggttgtgtcgttaagtctgccggttcggccttgtgagggtctttttcgttatttccctggcatcccattgacatatatatgctctgttttgtatatcaagaaaaagttgcaagacttataatgcagtgcaatattgcctacaccgattgacactttggaatacattcaattatcctcattggctgctgacgtgatatatctatctcggattgatcttttggcagggtactatattgtgtgtgtatttgggaatcacgagaacaaaagtcgagtaatgctatacaagatcatagaagatcagccccagccctgatcaaagacaggcgtcatattcgtcgtgattggctgcgcatacgagaatgcctcatatacctcaggcgtaatttcgtaggacccggggtcattcatcgtcattccggcatttggcatcccgcccagcaagtgcataggcggcagctggggcatttcgcccatgttcgggatgtcgaaacctgatcctgggtgctgaaaggtattgtaggctcccatcacgggcgggttttcagggtcggtgttttggacttgcgtggctatcgatgcttgcgactggtggtgacgatggcctggagagacatggcgggattggttgctgcctgctgagggggattgactgtgctgagggtggtggggatgttgatgtggggattggtgatgttgggggtgttcttgtttagtctcaggaatgggagtggggattagtccgtggatgttgatttggagtttttggagctccagggagatgaggctgagcgctgttgtgataacggggttggcgactttgactctctcaagggcgaaaatgcagaacttgagtttgtctagggttcccggtgcggcgtacttcagggcttggatctcgagcaggaaaatcgatgcggctgtatagatgctgtatgcgagagagagaacgacgtggctgtcgccgaatgtgcggcggtatagatcgaagagagataggattgatgttgctgatgccatgcactgtacaagatggttcgagtcgtacgcctcggggcgggctttaaccagctcccgagagcagaggattgggcggtggagaaggatgttaatagtatgatatagacagctagaaagggctgagttagaactgtattctaattcacgcaggattgggtacatacttcaaaatcacgatatggctcggtggtgagtatggaggaagatctaccactgccaatttcaagtagtccggaagctcatcccaccagtcattcagattcttggcttgctcctgaacacagtcaaagaactccgagtccgtactttggcggattgggtcgtatatgtggattagaatctgattcaagatttccgccagaccgcacatcttcatgaaacatgacgttgaatgcgcctgcgtcggcggatagtgagcaccatcagtgaagctaaccccatgaggtgtccatatttcgatctcagcggtgtcatcgagaatcatgcgtggcggactaacgcgagagtgctgcatcgtcggggcccggccgaagtacaatgaaacaaccttatcccagaaataacaactccaaaatagacggttccggatttcaatatcctcatcactcaaatgggcagatcctgaatatttccggctgtcgatagagatacccaagtcgtccagcagccggaaggccatgccactgtatagccaagcttgcgtccgatttccacggccgcattcctgggcactgagaaggagtaatgtctgaatgctagggatgcccgcataaccaactttgagggagccgaataccccagtcaatgcgcgatgggagaattgtgcaccgccgtcataggagtccagcagcgggccgacctgaggctccgctttgcaccagcgtaccgagtgcgaaagaatggcattcaataaaacgtccgagtaataagctccattgattttcatatcacctatttggggaggttagtgtcatatgttgtctgaaatgacaaggtcgaacagacgtgtaaatgcaggacggtagacaaaattccacagcggctggatccagcaccaatgcgagtcgagaagatactggaaaggctcctgcaggactgtatcagcatatgcatcccttgaacaatataatccaccaggacccataccggcatagcagccatttgctcgaatgccctctctcgccatgcgctattaacaagccgctctttgcgcccctccagttcctccgtgtaatgtgaagtcggcgtcgttccactcaccagcccactgggtagctggaacaaactagtcggcccgtgaaatgagacgcgaccgtcattttccacattgagaccctcaaatgcccgggtgagatcttcagcatcgggatcgatctttatccttggtccgctcgagctggactcagccgacgacggcgatctggtcttccgcacctcttctccctcacgactcttcgataaagcatcctccaactgcgcaaccctagcctcaagctgttttgtgtaagataaagtcggggctctatgagagagacaagagtgtcagcgactgcgacgcggcaaaggaatagaataaagaggaagggatcgactcacaagctatacacacactgctcgctacgcgcggcgcatcgcgaacacgacggactagcgccgttacatttaacctggcgagtagttagctcggaaatctcgggtttcgtccgagaggatccgcacgtaccttgcgtttacgacaggcctcgcatgagaaggcgctcttccgggggagacggggtttggaaggctctgccattcccgatttggcgttttaaactcccaactcgtggataaatacccctcaaaaggtcaaaatgaaaacaggagagaagactttgggcccctacgtggggcgcggggatagcctttttagaaaatgagatttgacataaattggggtagaagactttgattggtggaggatttggagatgaggaggcatctgggctccacgggaggttatttttatataccctagccttaggtagtatgtggtagttatgttgtacttgtacacttaatagccaaggcaattatatatcaaatgctatttgcatggtattcaattgtacacacgattcatacatcccttatttcttccctttcttgaaacctggcttgcccttacccttgcccttcttgggatccttagcagactcagcatcacccttgccctttttccacccgatattaccatcgtgtctcatctgcgcatcgtcaagacgcttcttgtccttattgctaagcttgacattgcttctcttggtattgggaccgttcaattcgacggcacccagcttgcgagaaaccttcttgtccttctcggtctcgaaccatgtccgcttcggccgcgacatgatctcgtttccgtgcttcatgaggttctcgcccttggtgaattgcatctccgcttgagagaactgcttctcggtcttctcctcttgcaagatctcggcaacctcgtcggccatatcctcggccttttgcgcccagctgtcggcaacagcttgctcgaccacacgactgacgatcttggcgccttgggccttgcctgcgcggacggcaagcttgacgaccttgcggtcgggctcggcagcaatcgtgcacgcacgaccggagcggccggcacgggctgtacgtccaacacgatgcaggtagatctcatggctctggggagcctcgtagttaatgacggtctcaacacccttgatatcgagaccacgagatgcaacgtcggtggcgagaaggaaggcaaccttgccatctcggaagttttcgacggatttgatacgctgcatgggaggttagtggtgctgtagatataggacaagagttgttgttacatacctgttcttggctcagactaccgtgtagttctgctgccttcaagcccaataggccgaaaatgatacggacgcggtgagcttctttcttctgtcggaagaagataataacgcgctttgagtaggcctctttgcacaggtacagaaggtaaccgagacgcttgtcctcccgtccgggacggagacgcacgaactcttgaataagggtggatacagtgtgcttcttggcatcaaccatcaagcgcattgggcggttcataccaacacgaataagtttgtcaattgagtctgtcatcgtcgcggagaagagcatagtctggcgagatttgggaatcgtggtgagaatctcgttcaactcatcggcgaaaccatcctcaagcatacgatctgcctcatcaagaaccaaaatctccagggtatcgactgtgaaactgggcgagttgcgcatgtgatcaatgaaacgaccgggagtggcaatgatgacatcggggcgctttttgagcacattctcctgctcgcgaagactgaaaccaccaaccaattgacagaatgtgacgtctgtgaaggtggccagtttgacggaaacattgtaacattgaacagccaactcacgagtgggcatcagaatcacaacacgacttgtaggaaccttgcggggacggaagaggagacgttcgaggatgggaacaatgaaggcagcggtctttcctgaaccagtcaccgcactaccgacgatatccttgcccaacagagcaacgggaatcgccttgcgttggataggagtcgggtctgtaaatccaactgcggcaagacctcgaaggatgggacgggaaagattgaattcttggaaagtcatcttggccatgttggccttggtgtcgaccttttcttcgggggcaaagaacgctttgcgcttctctgcttcctcctcgtccacctcgctctctacatcggactctcggtctgagcccatgtcgtcggggtgaccgacgggtgtggcgacagagtcgttatcagatgcagcatcgtcatcggaatcctcattatcatccttgtcctcgtcgtcctcctcgccttcgtccccagagccaggctcggggccctcagcatcactctcatcctcgccatccgcacccatgccgaaggcgtcgtcagccatgagctcatcgtcgttgaagtcaacaggcatttcgtcgcccgatgcagcatcgtcttcagatgcgctggcgctctcttccttctcgacagcgttctttttctgtttcttagcagcagcctcatccttcttggcctgcctccgctcaatgatatcgtcaatatcgacagctttcttgtcgccggaacgcttcttctcgttgtcatcaataccccaaccatcgaagccttcagtgacaccctggttcgcgacaccgccaacatcgaactcgaactcggggtttaagacgccgtcgtcttctgttgcatctgctgccgcatcatcgtcttcctcttcagactcgggttcagctgcgggctcggcattcttcttgttcttcttggagtttttcaattgcagcttttcctgctgcttctgcttcttgttctttggcttgactgcttcgacctcgcgcttgcgctttttgttatctgttgccggcgcattatcgtcttgcatctcgttgtcgtcatcttcttcttcgacagggggttcgttctcgtcgtcggaaagcgtgaatacgaaatcatcgtctttggcggaactccgcttcgccgattgaggagccattttgggggctggcgcaaattccagtgaagttttggtagctggatgccttccacactctctcaaacagacttaatagaaaattctagacccccaaacactgtgcaagcaactcaatctcgccgagaagaaatggatcaacatgcaaaaaaaaagttccccgggcggtgacaagaaaatttccgatgacataatcaaccgctttgagatgattgtcaacggctctactccacggctgcctggttgatgttctatcccattactacaaggctattaagaaagaaagaatcaataaaggcgtactgtctcaatcaactgctacctaaataggcattcctccctttctcattattccccccgtatgcccttccacatcgatctttttttggtgagacatccaatagattctagacacagattcatctgtctctcatttatctcattttcttttccgatttttctgtttctgtttctgtttctgtttctcttttccttccagactgtcgttctctccctgtcgccagatttcccgaagatgatctccgtccatgttctcgttcattcgcaggctcatcagaggtagttaagtatcacatgggtagcactatcctggggctgggcttgagtctggggtcggttattggtcacatatgtggccttgaggcgacgggccatgtaagtaaggtcgaaactaagaataggcgtcagtaaatgcaccaagctgaaagtgaaaacacaagatgagacccacccattgccacgctccactctcgcattctcgagtacgcccttgtccttgaagccaaagtccctctccaaccacttcttgatccaggcattctcctcagcttccgcagacgttgcaatggcgcaaaccattgatgtgaaggggtggccatagcccgcaccatactgcactgtgccggtttggtcaaactcataatcggtgctttgcttataggtcccatcaaagcaagagaggaccatatcgaccagtgcccgtccgatgtgctgattcttgttgcccttttggacgaagacatgcagttcacccatgtgcttctcagcactattgccgtgccgatggaattcgacataggcgtagccaaccacagggtcaatctggttgcggcacaagcgcaccggcggacgtcgggcagccacaacgaaggggagattgttatcccggcaaaattgaagaagctcctcaaactcattcgcctccatagattggagtttgctacccaaagctgagttttgtgcataccacttcatgatttcaaggatagaagaagtatcatactgctctgcggggcgcaggtagatgccgggtggaacgacttttgaatctggtggtagtgctagccaggcgcggtgagccgcagtgcgacgcaggtgctcttgttgttcctgctctttctttattcgtctttggttgaccttccccaggttgtagacatagccttccgatgtctcgtgccaatgaaggcgtgtctgctcgtctttcatgttcctgggggtggggatatgcttgatgtcagacagaatcatagaatgctgcccatcggggatcgcggttccgtcaaagaaggcaacatgaaagatatcaacccgacttcctgccggaagctggtcccaccagctgcgaaactgctctctgacactcgcgttaggaagatcaaacgatgaaatcctgtgtctgagttctcgccattgattatctgcttcttgggtgtcccaagtgcagtcatcaggaagagttcgatcaggctcgtaaacagcttcgttgcattctgatgtgagcgtgaggattccatcctggacaattgggaagatacggcgagattttccgtatgccttggcttgaattttctgccggacattacgctgggtccgaatgtccacattgttggacgatttggccttcttttcgattcctccaagttcatcattaggaatgaactcgggtgggtcagctgcccatggctcaggttcctgaataccttcggcattcctgggctttgcgagcaacttatagacactgctgctcatatcggccccaggtccatccctcgctgcgggaagcatctcagggcaagagtgactgtcgttgtccatgccgaagagaggctgctgcacaggcattttctttctcctgcgtttgtcaaactgtttggacaaatcccaagtctgtgcccagctcagattgtctaagctctgtatcagcttgtttctccccgtctcatccatggattcaaaagcctcaagcatagctgaactagaggaatttgagagcactgtcgattttggcttgttgggtttctcaggcgacttccgagaggcagcatttctatcccggaatggcatagatatttcaacctcctctgccatatcgatatgaataagagtttctggtagatgttgagtcagccgggattctagaacatcactcataccgcttctttggtttgttcggcacgtgtgtcacctgggggtggcattgtgtttgttactcaaagagtgcgacataaaatgttcggtaacaagcatacctgagtaatgggatgtactgtagtcacgagactgcagagcacgttctgtattgcgaatatgctgactgagaagaataaatgattgaagtgatgaaaggcggagaggcagacggagaggcaggcggagagatgaagatgggaggatgagagtggaataggcgaagaaggagagtgagggagaggaaggagggagggggtggttattacggcagctcgtccatgaaatgccagacactttgggcaatatcaagcatgtcgctgtgtgacatgacgaaatctgtttcgctgttcctcttcgcgcggaggtaacattcctggaatggaatttggattgatcccgaaatttggtggtcctcagaatcgtgatttcggtttcgaacgatccacatcttttgaacggacttgacggaattcccttcgactgcccatttctcaatggtgatagtccccctctcagtagttcttatagtcaacatgacttggacttgctggtttgactcatggaaccagaacgaagcatcttccttcaatttcttgagtgtttcagaccaccctgcctccacaaccaccgttggccattttacatctctgttaggtgggtaaccttgaggcctccaggtacaacttggtttcttcgcccttgtggtcccctcgacactcccgccgggtaccagacgactctcctgggccctatgccaagaagcgaatatctcaaggaaagtaccccatgaggtctcgtgtatagaagaaaccgtcaccctgaggataagagtctgggaggagaagtaataactcaagaatgctttttgaagtagcctgtctgcagacttattgtcgaaatcttcccggaaggcacgcctatctacgtgatcaaatataatatatgatgactggcctttcctataacgctttgattcaagttcaaggcatctaacacattgctctgcatcttgatacctgtatcttggtgttgtagcaggaaggccttcatttcttaagatatcttccgccatgatgattgcggagcgaagcgaagcaattataaatccgtagttggttgttgaaactgatgggagcgatgaaatatatggcaatcttggaagcatgacggtcaatgacgtgattaggaaacgtagccctagaggtagattgccaggtagtatacaagacctctacaatcgtatcaacttgccttccatgtcaagattctttaaaaactagtacaaaggacaccaaaaaagacatacaatggttatgaaccatgtgatatacaacttgggggtatcataccaattacggtagacatacctaaagtattcgctactgatatgtggcggtctcgcatcaaatccaacatcccttaaaagcggtctttaccaatggttaccgagaatacctgtttagcgtgtagctggtccccaacacgtcaagacgcaggtccaatacagtgcctattgaaaccatcaaatatagggggaaatacaccagcatgatattcagataaatgtatttaaatataaagtcactttgtagtaacgggaaggaacataatatcggccgatccataaacacgtcaaaccccatcttgagcctggcaagatttttccctttccaactctctcaaaaaaataccctgcggtatattttcgcagccatgttgtccatacttcggaaagcccgcttaaaggataaagaaatgcggatattgatgctgtatgaactctgatcgggtcgttcaggccgagatgctaatgattgcaggggtcttgataatgccggcaagacgaccatcgtcaagcgaattatgaaagaggatgttacgacggttagcccgactctaggatttatcatcaagacaattgactttatggggtaatttcgatcttgttaatatcgcgagctctgctaactcgccgcagatacaaactcaacatatgtgagcttaccgggtctctggtggggactgcgtactgacaacactaggggatgttggaggacaaaaaaccctccgatcatactggaaaaactattttgaaaagaccgacacgctagtatgggttgtcgatgccacagatcgactccgggttgacgattgtcgacaggagctctcgggtctgcttcttgaagaggtacggatgacgtttccaccccaacccgcaaatcttaagagtgtcaactgaacccattctaccagcgccttacgggagctagtctattggtgttcttgaataagacagatgtggaacattgcatgggcgagcaggaggttcgagaagtaggtctaaattcctcctttgaatttcatgccgtttgccggaggctaatgtctctgcagcgtctcaaattggattcaatcaaaacacacaagtggactatcttgccatgcagtgcaatgacgggcatgaatttgaatgaaggtctagaatgggtggtacaagatgccaaggaccgactgttcctttactagtgaacaggggaaatcggcgtgtttcctcttgatatccacgctaataagatatttaatagttattttaagtgatcttattaagtttttagatcgatctattcatatatctggccaacccgtgttgtttcccctgttatatctgaactaacgttcggtcgtattctaaaaatctccaatgcggtgcattttatgttctaaagaaatagcctagtacatgttaaattgtaaaagaaccaggctgcccatatctgataggctagagtcaaagaatagaaagacaagagttgaaaagtaacaagtgtctcctttcatggattctgtacggagcgcggagtacaacctaacgttatgcaaggcacaaactgatatatataaccataccaaaatagccacatatgacccaaccgtgacccaaccgtgacccaacctatccctttaacccctgaaaagaagaaaaccaaaagaaccagggaaaaacgagggaaaagccatggaaagagaaaactgcggggcccaatcgctccacataaataatgggagtaaacaaactcctatgtgtgacggattcaggtttggtcggtatagacgcatctatccatgtctatagtctagaaaaaataataggattgtagcaaaacagcaggataaatagattaaaaagatccatgaaaaagtgatgtgtgagccaatgaattggttgatcatcgccagtcccgatttaatttaaacagggcggagaacacagcccttcttccaccctacaactcttcccccctcatttgtttcgtttgaggaggcgtgcatgaacgccgagagtcttacatcatggctgctcccaccgagagttccgaggatgtcaatgatttccttgagcgcatccgggaactaggcgaccgccgtgacaaggaagacgacgagcggaccaagaaactagaggaggagatcctgcagggccggaaggaaaggcaagcccggagagctggtatatactccttcccttgatgcacgcaatttctgcactgtcacggcatctgctgcaggtcaacaatgtgctgatatctggatgactcaaaaaacagagcgtgcacgatcactcgccctcaccgacgattcatccaccctcaatatcgcacgactgagcacttcatctatcagcacccggtcgatcgaccctccggaactccttgagccaacactgaaaacaccgcaaaccccaggacccgagccaccgatcccgagcgtggattcgagtcaagacatggagccctccgatgccgacaagcggcggggatcaatcccggatctcggattggatctcggattggattctccctcgcggacacgactacccatgtctcgcaaccgcgcagggactttgtcatggcagcaacgcccctcctcacgggacttcggcatgtcacccgcttcaacatccccaactcgctccccaactcgtgcaagccacctgagaaatttgtctacggcatcggatgagaatacactgtctcaactccaattcggattcccgcagcccgggaaggatgcccctgtgctccctccatcaccggaccgcggggctgaatcggtagcacacagcgagaaagaggaacagatggatagccaaacagacgtgattgtggagcatcaagagcccgaggtggttgaagacccaaatcccgaactagatcaacaggaagcagtagaagagacatcaccgtcgcccccgaggactggttctcgtgatagcaacatgagccatcgcttctctgtatcgtcggtttcagccactggactggggtcgccagtgcacctgtcagagactacgaagctcgagcctcgacagaatgattcctcgttggaggagtccatgtcgccgtctcctacccagcggcggatgtcaccagagcgaacacggtcgacctcacccaccaagggcctgggaggctttgttcagagtgctatgatgagaagatcagatagtgtgtcaaaaaggtggagtgcacaaactccacaggggcttgggcggtcaaattccattgtgtcaaaccgcagcagtgtggctggtccaagtttgagtgaaatgacccctccaactcttggacgaatcaaccgtgactctacaactctcctacaaagaccaggctccagccacagcgaggcagccaccgagacacccgaacgaccaaccacagcggataaagacactgtgaattttgacagcccaggaaaatcattccgacctggtcactctcgctctgctagctctgccaccgcagaaggcagtgaatctcaaagtccgtttgtctcgaaaacaatggaccccaggcgctggagccccaacaaggcttcttggttggagagtgccctcaaccgacccgagctaccacgacaaaccagcagacccccctcgcagcccaactgggccaaagaccgacagtcgaaaggtagcgtggatttgggacgagtcaacaatttcaaggaagtcacccctctcggtttgatgcgaacacctccgccaggaactcatacaaaactgcctgggctctctgttccatcgcttccaacaagccctatcaaagatggtgttccagagtctccaataggattccctctgaagaagattggtatccctggtccatcggttcctacgacccctatcaaggatcctgagtctccaataggatttcctctgaagaaagttggtgtctcaggctcatctcttcacaggaactccgtctcagatcctccctcggaattccctttcaagaagtccggtaccgctggagggtcagttagcggaagccctgaaggcaagctcaaagatgcagcacccgagtctcccttgggattccccttgaaaaagcccctcagtgcgggttcatcacttcacagaaactccgtctcagatcctccttcggaatttcctttcaagaaatccggcacccctggagggtcagtcagtggaagccccgaaggcaagctcagagatgcagtacccgagtctcccttgggattccctctcaagaagcccctcagtgcgggttcatcacttcataggaattccatctcagatcctccctcggaattcccactcaagaggcccagtgtctctggtcactcagtttctggaagcattgctaccgttcctgaatctccgtcggagttttcatccaagaaacacagtatctctggttcctcaatccctggaacccccgatggcaaatcgaaggagatagttccacaatctccgtcagttctcggtggccctgacgctggacaaacagaagaggaaaccccagcttctccatcgcctgtcgaggaacctctcaatgccctgtcaagcgatgcaccaacggaggaacccaagtctgcttctcccgctgaaactgagaatgagtcgcaagaactacctgcatctgaagagtccgagcctcaatctactcccactcgcagggaccctcccgactctttgagccccaaaccaaacttttccatctctacttcttcgcgggtgcccatttcacccatggtgaagccacagtctcccgtgctggacttccgagcaaacctgcggaaacgagaagtcgtcaaagacaacggagaggacaaagaaccagaatttaaaaatgtatttggacgcctcaaaaagactgaacctcgcagctacgttccccctgatgcgctcaagggcaatatcctactaggcaaagctgcgctgaataacaccggcggaccaaagaagaccgagcgagttgatgaatttaggaagagccttgtggtgcgcaaagatgaaatgaaagccggcgggggctccatcagacggaatacagctggagagcaggatgcgccaccaagacagactgagttcgtaccagaagcaattgctatgcgacaaaatatgacccgggcaaacagcatcaagcagccacttgtgggtgagccggtatcgcctactaaaagctttgcttctcgaatttcgcaggacagaccattgtcgtccccgaagtcatctatcaaaggcatcggttcatcgcgagcttctcaggaacaagaaccattgtcgccatatgctgccgatgatgagccgacatctcccgctaaaagctttgcttctcgtgcttcggacaaaccattgtcgtccccgaattcatctttcaagggaatagtttcatcgcgagcttctcgggaacaacaaccgttgtcgccattccctgctaatgatgagccgggctggcccttgaaagacaccagttcctcgcgtacatctcaacaatcacagccgttctcaccgttccctgccgatgatcccagcgatgagccaggggagacaatccccgcggcgagcgactacaagcaaacccccgaggtggtatcttcagtgaaacaggaggaaaccccaaaagccgttgcaccaattgagcctagcatagtgaagatgcaggaaccctcagtcaggacactccgcccagttcgtcaatggccaccggcacctgttgcagaggctactgcgactccaactctagcacctaaaagcaaattggcgggccgaatcaaccctgcgctagctggcctactttctcgtggcgcgcctgccggtgacggaccgaagaagcaactggcaacccctgtctcagcgccgagtaaccctgcctcgccatctgcgcctctcacgcacgtcacaaagggtcgtgccagaggcccgaagagacgacttccccagacaattgatgtctcgaccccgcccgctcggaatgctattaaggaggttggtgctatttcctatgaagccaccccgccagagactcctacaatccctgttgagtccttggacatcgattcggagtacctgtcgcagtctgatgaagacccagttcctgacatcaaaaccccccgtgcagacagcgcagtcaccgagcaatttccggaggtaaacactcctccccaggatacccttgaacgcgatacgcccacacccgaaagtaatttccagcgcgctctccagaccccttccctaacaacgaatttcgacatgtttccctccgccaatcttgaggcgacacccagggaacccgaaagccctggagaggtgagtccatctagcggaccacccgtcccgccgaagtttgattctcccgtctcccccttgcctgtaacgacaaagacacaatggggccagcaaaaccggtttacgtcctcatcaccgtacgctctcctaacaagccagaaagtgaaccaaatagaatcacctatgagtcaggagaagagcatccccgatgttaccgtcgagtcatcacgcagttccgtctcacggcccttgagccatccctccccgccagtacctcctaaagacgatgatgttatgctccataagccacccaatccgcgcagactttcaagaaagatgtccgctccatcactagtggcgcaagctagtgaggcacgtgaggtaattgcgggcttcttcaagacaatccctaacgctcgaaaccgcatggacattgatccccagctgatggtaatgcgtaagccggatgatgttaagatcaggaccgtgaagctacatatctgggagctcacaggtgatgggaggcgtcaggaacttccttcccacctggagtacattctataccaaggcagcatgtatctctgcgtgcatacattcgagaccgaacgaggcaacgtttcggaagtatacctttggcgtggagacgatgtccccgacgcctcggtggataatgaacagccgtttgcacgcaaagtcgctcgtgaaaatagctccaagttgcaaatcattcgacaaggcaatgagcccaggcggttcatccaagcgcttggtggcattatgatcacgcgtcggggatccagctcccgccacaattcatcggctctttacatgctttgtggccggaaacacttgggcgagatgaccttcgatgaagtggattactcgctgcgcaatctctgctctggtttcccttacgttgtctctgctccgtttggcaagctctacctatggaagggcaaaggtagtggccctgaagagaccggtgcagcccgacttatcggcatggacctaggtctgaccggagagtttgaagaagtcaccgagggtgaagaacccgacgatttcttcgatgtcttcgcagggcccagggaggccgcaccgcacatgtgccaggattactggaagctcaagccgaagtacaaccacttcggcatgcgtctcctccgcgtcgaccacgaagtgaacccgccaactcgtttctggaatatccgccgtccgggcgcaggtgcaccagtggttaatgccaacgattgcgttcaagaaatagagccattctgctaccgagacattgtcgagaaagatgtttacgttctggacaccttctttgagatctacgtgtaagtaccaccgtacgacaatgccctccactcgactgatgctaattccctcacagtattgttggcgagcaagcctcacagaagtctgccgatttcgcctcggcggtggtcttcgcgcatgaatatggtattcttgccacatccctccaggaccgaccattcatccccaagagttacgtggccctcggcggcatccccgaccgctgccaaagcgcattccgcaaatggaacccacgtgcccagcatgcgcctttcgtgttctctctggatgttgttatcgaggcgattcgatcaccagaggagaattgagtgatatcttgcgttttttatctgatttttgggggggcttctgctttgaatttgtgcatatttcggtttgtacaggctttacagagcatttcggagtcctgtgtacttgtgccatatttgcgccatagagggaactggagcatctggggactgttgggatgtagatagggggatttcgcatttgatggtgtatttaggcatttttagcaattcaagtttcataccgaggctgcctattacctaggcttttcttatcttttgagattacatatacaacacagaaattaaaacataaacatctgaatcctcgggcaatttaggatattcaagataatccatggatgcaatggttatggacgggaacggaaaaccgatcggagataaaaaaaaaatcatccgatctggaatgtcgccatcctcgatctttcgatcgttcgatcggacttgtgaataatttctccattcttacatgctactcttcctcatggcaatgtaaatattcgagtcatggacccctccatccttcgcgagctctcgaagctcgaccccgcgctacccttccgcgcatcgaccgatcatttgcatcacacatgggccaagacattcttttcgcgcccggagttgtacattcgtccacaaaccattccagagatccaacagctagtgactctcgcccgtcgctgtcgtcgccgcatcgtaacagtcggcagcggccactcgccctccgatctgacctgcacctcgtcctggctcgtcaacctcgacgacttcaatcgcatcctccacgttgacccgtcaaccggctcggtaaccgtcgaagcggggatacgattgcacgcgctgggaagagaactggacaaacatggcttgacactcgagaacctcggcagcatcgacagccagtccatagcaggcgtcatcgccactggcacccacggcagctcccttcgccacggcctggtgtcagaatgcatcgactcgctcggcctggtactcgccaatggccagcacgtccgctgcagcccgacaaacaacccagacctgtttcgcgcggggctggtatcgctcggggcgcttgggatcgtcgtcgaggtcaccttcaaggcggcgcccacgttcaagatcgcttggcgccaggagcggtattcgctcgctcgcgtgatggatgaatggtcgatgggtctgtggacatcgcgtgagtttgtgcgcgtgtggtggatgccttatgagaaaggcgctgttgtctggcgtgctgataaaaccgacctcccgctgcgcgctccgccgaaaaccttctacggcgactcgatcggctaccacatctaccataacctcctcgcgctgtccttgtacgtcccgcgcatcctgccgtgggtcgaatggtttgtctttggtatgcagtacggcttccgggccgggtcggtcgtcaccgaggccgttgagcccgcgcgcgagggattgttgatgaactgtctgtattcgcagtttgttaacgaatgggctctcccgctggaaaagggtcccgaggccatcggtaggctttccgcctggctgcacggcgacatggagaccgcgcgcatccccttctcatccaagggactgtacgtgcactgtccggtcgaagtgcgagtctcggacacctcgctgaacaccaagccccgcccattcctggacccgacgtgtcacgacggcccgacgctctacctcaacgcaacgctttatcgtccctacctccgcgacccgccgtgtaaagaacgctactacgaagccttcgaatggctgatgcgagagatgggtgggaagccacactgggcgaagaacttccacacaaactcacacgagctgggcgcctcgtacgggtcagacatggagtcgtggattaaagtgcgttcggaggtcgatgctgacgggatgttcgtgggcgaatggcatcggcgtcacctgcccctggaactcgggcaggcaagcgcagcacctgcaggcgagcggctgcccctcctcgagcgcgagcacgaacgtcgcagggtagacattaatggcgtcggcgatggcgtcgaatgggtaggggatcgccgatggcaggctcaggctcagcgacaaccttttgatgcgctggatatggagaagagcctgtatccattaccgccagatcactctcctagtccgcctgggacggcgagcagcgaggagagctttgatttgcttgccaggggtgaagcgagcatattgctccccgacggaccgggggtgtgagaggagagaaatcaggctccggtcgaaagcaaacaatctcttgttgtcgggtgcgcgagtcctgattattccgttgcttttgcatctgctgatctatcggtgattgttctgactggtccattcccgggctgtgttgtggcttattggggtgcttattggctctacgggctaatttggtgattatccccgtcactttcgtttttttttcctcttttttctttttcccctccccctttgttcgaagcaatttggggatgataaattacaattggttggcaaatctgacatccgaggatgttcaggcttcgaatcctccaactgtttccccaaaaatgagggctttttttagatctccttcctatatggaacattacatggaacatatagagggatattacatattgcatactgcatattcccctgcttttacccttgttttgcttttttcaccccccattttccatttgccaaggctaaaccagagaaatcgtatggcctcgtggtctctaacttgaaatttgaatctgtcggtgaacgagtctgcatgtttgatgcaggtgcccataagctcttcgatagggcgaggtttgtctgcttttttgcttttgaaaatatgcatacaacatacagcagtcaatagttgttccattcttgtacacactgtggccaatttacgcagaatagattatcttgtttctatggatcggggaggaaagaatcacactgtgctgtgtgtgtccgtgtcttgtccttgtccctttcccttgtcccctgttccctgtcttgtcacagctgagagaccttgagatagtccatgtatagagtacccaacaaacctttcttacacattgcacaggtctatacaggtccattgatttcattgcactccatggtctagacaaccggcaaaccggggattcaggattgatatttatctgcttgatatgagggatgagggaaaggaagagagagtacagatgtactttgtagatcagtgataccctgtatggtattgcagctcgagctgagcactgtgctgcctggtatgtatacttagtatacctcacacattacactgccaccgtacaaacgagagatcaatgcaaagatctagcctagacaactgttcagattagggctggatctgatcattgcacacttgattctgtgcgagaatgcaggcagtaccagggtaatattgtacgaagatagaggcatcaagacagaacagccctaatcggatacataatcaggggaatatcaccccgctttgtatcagaaatactcttccttgtccatcagcctctttaactctttttctttcggaggctgagagcctaacagttgattgtcgctatcatgttcgcatattggcatattctggcatatcatgttgtaccacgtttcggtgcagctggcaaggatgtctatatgtccgatgctttttttcaccgacttctttttatctcgcattgacccctccatagctgcagattgactaggtaattgattggatctttcttctcatcgcaaatgactcggagttggcctttctcattctccaggcacgtgtgttggggatctctctctgacgtgcagtgtcagccttcgaggggaaaatatcgtgtgacaaggaacgttacctctctctgtcgtttcctgcccaatgactgggatcaaatctcacggactcacggctgggactgtgtcattgtactggtctctgggtatcctaagcagtcgcctaaatgtctacggtctacctgcttgccctgggattcaaaccacatgtcaccaccctcgtcaccctcgaacgctttgaacagtctctccacgtcacggcttagctgctgatgcgggggacgacgtctctgcacctttgataatcatgatatcaacctttggcgctggcggctgaatgccggtttcattatcatccaccccacctgctcgattcttttctttttctctgtttttcttttttatttgggtcaaagctctctctccctctcttctcaatcttgagatcttgctctttcttcttctttctttctccacccttcctcttgcattgcaatatctacctcccttgcttggtttccggtggagtttccaatatgatacaatccatgtcgtggcagccaaagcttcgccccaagggtttcccgcatagcattgatggctttgctgcggtggcttcgttgtcggagctggagcatcgggcccggactgaggacaagcgggaccaacgcgtcttccgggtcaagcgtaagcatgttttgaaagcctgtgatcgctgtcgcgtgaagaagaccaaggtatgtcaatacaccaggagaccttgatttgcctaatcttgttagtgtgatgggaagcagccttgcaatcgctgctcggtatacaaccacccttgtctattccgcgaaagaaaggccactcagaccaaagtatactctcgagggtgagtacatgcagagaatctcaagccagacatttcctcaagctcatagacaaaccatgcacagattcgtcgaaatgctcgaatcccaccattccctagtggtaaaggcccttcagaagctctataaattctgcgtcaacaacgaaggcttcccaggcgatcccctcgccgaagccccagacggacaccccctaacacatgcaatcctcgaccgtctggggctaatcaaacaagccgaagaaaacgccgacgagccagacgaggactcagaggatctgcgctacctacgactgctatcaacatccaccgaatgcagcgtcacagcagagccctcgccagagccagcaacacccccagagccctcacccatctctcgccctaccgcaattcccacaccagtctccgtccctaaccgcacccccaccaccacaagctggcagtgggatccccagcccgttcaccagacgagctacagctacccagacgcagggtaccacgacttgatggtgatgcagcaacggtcgtccatgagtgcaccggacatgggcgctgatattgcgcatattggtctgccctctgggccttcaggtctaccacatattccgcaacatgcgcacctcgagccgccgttcccgtatgtcttggatggatgctgcgatcccggcaccccccaacatgatgtcaagcccgtgctgtcgaggctaccgtccggtctcatggctgagtctcattcgcatccgcaccatcttgggaatctctcggtggagatgatgggtgactacaatttccagcatgacccggcgtattatcctgggtttacacccggctggaattttccttctggttaaatctgttttggtatttgctggactgtttctcttgtcttttggagatacatggtctttgtttatgatttgggttttttggtacaagctgttgagcagctagtttcatttcacttcttatctatatttcacattctcttttctatttctcgtcattatgatttgcattcttcttgagctcttttctttctctttttctcactctatacccccctcatctgaatttgaacaccaccggagcatggagcacgatatgtccggcacattgagccctaatccttttggccagtcctttttttccttctcgggctcagccaggtctttctttggatcgtcattattgatcttgatttggatttcctttgattctggtatctagtttgaaagagtatcaccctatcaatttaggtcctatatgcctttggtcttttcattttcctcttaccgctagcgctcgcgttagtccttgggtagaccctgtctttgtatagaatgggttaggggtggttacttacaatgagatatggattagcatagtatcatacctttgacagatagacattctccgacttggggttatacttcccagccacggccatattcaaacaataccaacgacgacgcccacaaatcctgcacataacacatgatacatacatcccacccaaccagtccaacatccccaacaaaagataacacaagaatagaaaatcggctcacaccagatctagatctcgcaccaggtcatatggtcgtacaatgcacgacctgacacagattcatctagcatcaacttggaaaagaaagacagccgcagagatctgaaaatagttaggagcggcagatcagatcgtatcggatcgtattcgcggcaagtgcgtctgtcgtctttccttccctgtttgggctggaggactggggagggagggctaggactaggctgcgtgcgggaaggttgtttgtgggacttgagaacatgctttgtcgggggttgctgcttgctggggttgtttgtgtaccctggttttgtacggagtacattggtggatatactaagatcgatgtagatgtaggtgatcttccgatatatatatctaagaaagggagatgcagtgtgatataggacagagaatgacattagacattgcaatataaaatatatatcgcatcatgctctcgtcctatcatgcctggtggaaatatgttattttcttgtaatccatttggttggttttgcctatacctcctccctcgcactctcccggtgtttgtttaatggagacctattcactcttgccacttccacatgtgttttgtaagacacactgcaactacggcgcttccggggatgtgcccgaaattcaacatctccggccaagggtttgccgactcgatttgtaggaaatcgaaatcgccgaagacttgccgacgcctcgctcttaacataatcacgagataaatggcctgtaaatctccagatcgccatcgtggttctatctctttgaacccatgtccccttccgcttccgggatctttcaaccagtatgaatgtgattactacctctgcagtaccctttgaagtaccctttgctaatcctggagccgtatatgcatatatagacaggatagtatcggccggggtccaatcggctgccgctctacttagtgaggcccaggaggacttagtgaccagattagggatgtgggtcagtaggtaatggatcagacaccaatcaggaccgctctgtgttgcttagtaataatttagtatttatttttcagagggcgatcagtcacgtggtcctggtcaaggtaccatatataagccccagcagcagcttggaggtttacacctcctatgaagtccacactcttctttcaacagtatccttcacactgtctacaaaatacaagtgaaatacttcttggatataggtgcgaaacacattcaaatgaacgactcggaaatatccagttaacacaccaatacttgatccagcacatcaagcgtgttgcaatatgatatctagcaatatgaaaaccgaagacagcggcagctctgtccctccaactcctcctcctacccctgctcccagacaccaggctctatcatggagaggttttgcagagacatttgtgattaactttgtgacttccatggctgccaccaataccagaaacgtcgtcttcaagtccgacaatccttaccttctgtgtgggatttatgcatgttttcttacgttgtttacttttctgtatcggaaattccaggctctttacttgcggatggataagtgaacctgggatcaaggatgagagcttactcatagcataagctagctacgtattatttcgactgcctggctccatgttgcatcaggattggcctctaatcgactcggaatatgatcggaggatgagctggctggatcaggagcaggatacgcgagcaaaagcccgtaaagcgacatgtcgacccacagaaaggatcgggatcagagtcctaagtggggagggaagagggggatcttcattcttccagaaaacttgtcagtatccctgtctaatttgaggcgaagtgataaaagccgtaactagttagccattcaagacacatacaacatagacgggtggatcttggtatctaatagccatcgacttgagggttggttcaaggcatgagctaggtacaacgcgaattacttagcaatcccacacccatccatcgctaactaagctttcttgccaatccgattcaaccgaagcagcctaggcttcctcggccttatctgacgtgacgtgaaattggcgacagatctacaagatactctgaatcgtttgttcgcacgtctttaacagccaatcgtctttggtatcggcttttcccaccatattcactcaagtgatgtggtttttttacatccattcctcggtgatgtagaccaatggcaaaagcaccgcatgcgaagggtagttggggtcaggtatttctctctcttcttcttcttcctcgactggacagcttcttgaagatggggttctttggaccggatgaagagtttatcgaggttatgctttaaagttgttgtgcctaatgacattcggaatttcctataggattagaatccagacgaacgcttttaatttgacatggtaggttttatcggagatagacatggactagtcggccagtgtattttcaaaaaaaaattaatacatttattcaatccagactctattttaaatctgaaagtagccctgttgaatcactgtaccgcgatgatcaggaggacccggactgacaccaaccattacccagaggagtaacgagttcgtagacagcgaggttgaatgacatcgccacacccaagtccctccataattacccgatgaataagaaaattcgaattcgacaccagaaaacgccttggtggcaacaggcctaagcccagggctagggcagcgcaacgccgagggccagggttcagatcaaagaccagtgttacacatacacatcacacaagctacgctgtgagtacaatcgatcaatcaatgcatgagaaaggaatcaatcctcgtcttccgtctctgtgttggtgtcgctggtatcgcctgcgtcgccgtcggtatcactctcgctggagtcgtcggaatctttggtcttcttcttaggcgcttggccggtcttgatcgcttgcatttggccggcgatggagtctagggagggttagtataagcgaaacaggtagtttagtggtttgggaagacttaccctcgtctggctcgctaatgtcgtcttcctcttgcacggcggctgccttggcaggatcgtcaatgtgcaggatgatttgagccgtgttgtcaagacccagatagctgtcacagatcatgtggaggaggaaggagaagtcgccgacctgtgggggagcctggaactgcatcttgagagtctggacgttgaaggtgggcttgccggcctcgtcgaagatcggcttgtcgaatgtcgtaaatgtgaacggcggtacggccatcttgccctgcttgccgtctgctaggaagatgttccagcgaggggagtgatcgcgcgctaggtacggtgcgttggccagaggcggctggatgctttcaatctttgcctcaaccttcttaccgtcctccatcttagtggcgctgttcttggctggcttgcgacccatcagggcttccaggtcgtcctcgtcggggtcaatgtcctctaggtcgagcgggttcactggcggcacggatgtgctgcctggcgggatgaagcgggctttgactaccagctgtaccagactgctgggtgtgatcaccttttctcccataaccttaaagaagatccgctcgggttgaagcaagggaagttgcttggcaactgatacggcgtcggtgtattgcttatcggatagaagaccagcgccgacagtaagactgcgtcgctgagcctctggtagttccatgtacctttggacggtgagatgttccttggcgtcttcgccctctacggacttgacaatggcctcggtgaagttgggaagttgcagcagtggtgatgagcccggggacacagcctggatgaggttctgagacgttttgaaggcaccgacgatcggtccgagattaccaaatgcgagtgaaatagcagtgaaagcttcagtgagagcaagggcgacaggagccgcttcatacttttctgcaggccagttagtggtatttcagaatatcatcggggcttttcttaccagcatccagagaagcatcaccaagatcaattcgcccaagataagcccataacaaagccaaggccttccgacgagaggagctatccaattgcttcagggtatcacggtccttgggcgtaaggaacgaattatcatctgccagcacccgcttctcgagcttgttcaggccagactcggcccgggcacccttgagcatatcgttgaattcctcgccagacgacaaagcgctaataatcccaccttcggtaatatcgtccttgtactcacggaaaatgtttccggcactggcgacaagaacgcgctcctttgtgtagcgctgagatccataccaccacttgccgacgatatatggtagaagaacacccaaaagggcaccatagaccatcagaacatatttgccattgccatccatgataatgaacttgggaagggcaataccgatactaaagctctgctttccgtcggggtggccaaattggaggtagttgtttcgcacctcctcatcggtgagagctttatatgccttggtgagctccacgaaacgctcgttgagcatctcgatggtctcattcttagaggggtcaggacgaattttatcggggtgaaagatcaaagacatgcgcttgtaatgtctggagatagctttttcatcggcgttctgtttccaagaatttagtcagtgaaatcccctggacgtaggcacgcgccgagctgaataactcaccctcgagacacccaaaatatcataagggtcgtatgccttcaccactgtcctagcggtgacgacaattaagtagaccatccatgccattacggcatagccgacgacgacggtaataatgcgcttgattcggcgctcttttcggagacgcttgcgcttctgcgcgtcaatgaggtccgcatctttaggtttgaaatcggatttgatgcggggagcggtattctcaagctctgtagatcagatatagcggttagccgggaaccacacatatatagtcccaagtctcacctttgctgggtcgtaggaggttataggtgagagggagagtgaccaggccggtcaaggtgaggatgaagaaggggaagaattgtccctgaaggttcaagttagcgttaccacgtctttatcggatcaaatcccgtccttacctgctcatcataggtgtagtctgacgacatcctgcggcgacttttagggtatagacagcggaggccgctggccgcggaatttaaagattgtgttgcgcagggctgttgatagtagccactttggatggtcaagagaaggcttttgggctaggggaatgacacagtagcctacttagagcccaaaatgctggctcacaagaaacaaaggagtgatgcaggttgggtctatcgcacttcctgatctggtgatgaccgtgtcctctagcagggtccactcaccgcctgccttaaatgggagtgaatacgtggcagttttttgagcggtgcaggcggtgaagacgacatctgatgttctacatcggttgcataactaccgtttgttgttctatcttatgcttcatggctttctacggctttctacggcttggaatgtcaaatatttgtcaaatatgttcatgatttttggtaaatgagctcaaggctgcatatatactaattaaatactctaatagagctgatcgatatccaatcgatccatgcagcagccttcaccacttcctttcagttaggagtcttgacagaacagatccatcgcacacaattctcccctcgtaataaagataaccaagacttctccagtccgcccagaaaaggaattcaagcgtcaacaactcgaggtcggacgcaaactcaaccaatccagacaaagcatcggaagcatcagccagaaaatgcctgattcattttctcatgtgtgtgatacaatcagtggaccatgatcgacacggccgggccaaaagggaccaatccgatacccgaggtatcttcattgctacaagtcggggacccgggaaacccgtgtgatctggcgttctcgccgttatagtgtggtgtgggcgcatttgcagtggccgaccgcagacgcagggcgtgcgcgttgtcggttcattttcgatggcagtttttgttttgtttttgtcgaatgcggattcataggcgtcgcatattcgtaaaatcgttttggtgttttgttcttttttgttgactgaaaaaaaaaagttggggaaacaatccgtccgggaagtctccagacagagagttcagacattcaatctccaagggcacggccactcgttctggaagaaatgtcaggattgttttttcgattgtgtcagaaccgactggtactcacgagttgatgtagtcgagtccaccgaagtactcaagcatccggtaacagaggctcacatcgtcgcccggctcgccaccgaacaaacgacactgtgcttcttccagcccagctgattccagccgcgaggggcgctcacgggtctgccacgctgtatacccatattgccatggtggagcgagggtgggagatccccgtggaatgcatgtgtccggggagttgtcggcagacacaagcgcgcaaaagctgttctggggtgtccgaatggttgatttgacggacaaggtcggatgttgagcgagcagggtattaggtatgcggttggaacgacgagtgcggcgtctattatgcctctggcccattctcggcagttgaagaatcgaggatcaaagaaatggagaaagcacttttaacaccgaggggagcgaccatcacctcctggaaaggatgagatgaggtactgagagaaaaacggcatgcgagattgcaggggtgactctttatagaccgaactcgccaagtgagtcacttaaaggagaaaaatgggcgacccgcttttctgggtgggacccgagggaggagatcaccttgtgcgatcaccttatggctttaagaatggcgccagctcccacaaggtcctgcgctacttccaattggtccaagggcgagttttctatcgcgtcattcgaggacctccagtaatgattagaattaacggcgtttataaaatgaggtgattcgccttagagatgagcctagagatgagcctagagatgaacctagagatgagcctacaatgacattgagtcatccatgaaattgcgaaaaatgaaacacaaaaaatgaaacacaaaatgacgccgtcctctggctgtggcatgaggtgattgggactgatctaggccgatgccggattgcctaaagagtgccgtgcggaccgagcgatgatcacatcagacgatagccagctttcccggctttaccctcatctaccctgacgtaccctaaacaacatggagatgcacaagtacccaatttgcctaaacagcccggagactggcgaggtctccgctgcgattaatacctagcaagggatatttgaatttttacaccttgcgtcgaacaaacgcacgtgtgcaacgtgttcaacgttcaacgtggagaaccttggagattctcagatgccttccaagttccaagccacaaggcaatagagaacggagtcatatttgatttttcttgggagatctcggcaagctaaacgaaaccttggggtggtgactattgactcagatttaaaaatggagtgcctgatctgtgaggataaatatagcccggaagaggaaatttcttcttttgacgcttctagtccaaacagaacaaacagacaaacagacaaacaatgcaaacacccagattctagacctccttactccctacagcagatcgctgtgccaacagtgtttaccgatcactatattccggctcaatgcaatgcgcggtactgtaaatccttcctcgtctgcttcgaagcgtccacttcaatcatccacttcagagctatcgacctacgtaaaaaaaaaaaaaaatgagacgttcattcagtcgttgaccgctgtcttcaagttgtggagtgtactccgtagttagttaccccctactgacatttccaaactaacgattgcgtcttagggatgatcctattcaccatgatctccgtctaggattctccaagctcgggcatgtcatgcaaaaggcagttacaacttaaacttattctacgactcccttgtcaaagtgtgtattgtaggacggttcctgcaccggatatcccgcacctacgcctcatgcatctcggccactacttttcctgagtttacccggtttacccttagtacggtcgatcaaagaccgctgtggagtttactccatcgctccgctggatgtagaatggaagagaataaaaaagaacaaaaaaagaagctgtttcacgtattcgacggatgctgaagttctttatctccacactggggcttcgttttaatggggaactgcccaaagagagacaaaggggctggttgcgattccacacgaaaaggaggttgctcaagctggtgtctgtaggttgaagcagaaggactacgatactacggagtagactgtaagctcttgaggaacaagcgctggaagtcttgtcgatgtattctgcgttcaggggtaagaatcttagattttttcactagcgtggccgtgagggatcgaccggggaacttgaacaatagttatccattgctgccttattctggaaagcagtctttgtctattcatgtacgatgcgaggctctacccaaaacaaagacttgaaaaagcgtaatatttgagatcaaagggatcatctatgttggtcgaggtcgagaaatcggcaatatcacgtatcggcaattccatagctatcattgaccaggtctcacccagtcataactagagtcagatacaagagcaatgcattaaatgtataacggcgttaacaataatcaaagaccgacagatgtaatgaataagaagaagacggattgaaccaggccgtgtacacaaagcccgaaaagcgaaggagaagaaggtaaacataaagaaaagcgaagtgaagggtaagagggcaaaaaagaagaaacacaacccgcgtgtgtactgtacagggtcccagaatccggaccatgcctggccaccaaaagccatcattcctgtccaagacgttatgaataggatccaactctagaccaaccattcccctaggaagggcagcttgcgcatccccgaaatcatagaccgtagctccaaagacatgcatgacaagtaggaaggaatcggaaattccgactagctaccgtgtagctaccgtgtagcttcggccttacttcttgcggttagctcggcgggcagcgagatcgccctcagcgagccacttgctggcgttcaccatctggacgacgttgacgaactgcttgaacgccatgatggggaacgagatgccggtgatgatccacggccaggtgctctcgagcttgttcgcacgcgccatctcgagggctccggcgctccaggggctagcgaagaggctagctggttcggggtgcgcggggcttccaggctgggcggaggacagctgggaatcggagatgggctgcaggagcgaaggggagagggttggcgaggagaaggacaggaggtacaggccgatgaagaaggcttcattggcggtacagcagatgaacagaacgagctaacaaaacattgcgaataagcttggggacggaatatcagttcactgcggggccttaccttgctggtgtagtactggtacataatccagctacggctaggatcgaccttcttgtggctctggctagctccgcccatgcttagagtagcgtacatgtgcatgtagtggctagccatgtccaagctgatcagaccctggaaaatgatggcccatcggggccaggcggagctcaggaagactaggagacacgcagtggtgcagcggtcggtcaccatgtccagcaccgcaccgaaagtggtggattggttgaagtatcgtgctgcataaccgtccaggccgtccagcagacaggacaccgtgtagaggaaggagcaggtccgggggtggaggggcatgtagtatagcgaggcgaaggtcaaaaagacccgggaatatcctgggaacgtgttaaaccagatgccaacgtcaggcttaaagccacatcagcggggcattctaccgataagattcggagtgaagaggaagatattttccttgcgttccttggtttcttcccgtgcggatgcgccctctgaaggtgacacggagctattgcctgcatcttcgctctcctcggcgagggaggccttttgtcgtcgtgttgcgctcattgtgatgtgaaagggatgtgactggcgagcggtttctcgtataggtcgggggacgtatggataccggacagttggtctaagcgctgtcagcgtcgggtaatcaagaagcaaagacagaaacgcaccgagataagaatacagcgaattccgtcaggataaggataggaggtggtccaggtgggaaggagaatttcaacgataagggaagataagcgcgctttgttaacacgcactcgaaacttccaagggtcgatgaaagagggaaaagatgaaaaggtaggggatgaaagaggaagctggaaagatggaggaaaggaaattgtggaatgtctgcgggttactcggaaccgtggacttgagctttccccacgcggtccacttggaggtgatcgtgatcttgagagataaaaaccggactggacttgaaacatcccatatgtgggtgcaacatgtcaagtctcaaaaactgaagatgtttgtgatacttgatatagacccttggagacagcctgtttcatatatttaggtgtttcagatattgtgcgacctattataatcttgtaaaacatgcttttatagacatcatttgattatatatgaccagcctacaggcctagaagatatgtacagaacagaacccaaaatatacaagaaactcattcacgtccgtgacctgcgcggatcagtggcatcctgttcgcgccactcgcgagactccttagtacccatgctgccaacgccgccctcgagacgacgctcccagccaccaaggcgaacaacaagacaagtagcattgtcaccttccttggagacctcggtcgaaaaattgaccacatcgcgcgcgccctgctccggcgtgttggattccttgacgatatcaacgatctcctggtcaagcagtgtcccgctgatgccatcggataccaaaaccaagaacgagaactcggccgggccaagctctatgcgcgtgagttcaggctcggcagagactccgatgcgcttggagtggacatcgccgaaagcgcgcgtgttggctagcccgctcatgcgttcttcgccgaaagagtccgttacaaagcttgtggcataccgtctgagtcgggttgcctcgactggggaggaggggtggtggtttgatgtaacggggatggctataccggtttctgttgagcagaggagtatacgggtgtcgccaacatgagcaactagaaggcttgatggggcgatggggtgccagaacggggttggggtcggggtcgagatcatggcgatgcttccggtgctgccacccttgaaccgagcgcttccgccgatctgcggagatcgggtcatgctgggcctgtggaagatctcatcttcgttcagaggtcgctcggctcgaacgggatcgtcttctcgcttagctgcttgagcgttgacaaagtctagatccgctcgcaggaaggcgtactccacaacttcctcgatggagatgtggttcttaataatcgggtcgtcggactcggtgccattgtaggcgaaatgcggcggctggaacctcttgaagtagccaccaactacccgtctccaggtctgcacaaggtgtttctctagggctccgattcggcgacggtcaccctcttgcatcacaggtagttcgctagtggtgggtggcacttcggcaccaggtcgtagactggaccgaaggtcgatatcaaatgccgcgttctggatatactcgtgaaggtaatccctcaagaacgaactgcattcggatccgccatggccatcaaagataccgaagtagaagacttgtggatctccgctagcggtttccgcaccgcgcgactcccggggttcggccagaggatcatttttgttaggtcgcctaatcgatagcgaagttggaggtcgcttcgcaaaggcggggatgtcaatgactcccgcttggtacgtgtcttcattcgaagggcgggttccgcgggaggtgacggcgccgaaatggtgcttcgcgttgcggagtggaatgcggacgactgttgtctcccggtctattaaagcttggaaggcagctggcgatcgtggtgtgtctccggtgtgaggtatagaggcggagcgaggaagtttgtggaatggtgaggccggaccacgggggtccggatgaagcgaagacgacggcagatgggtgacaaagtaatcacgaaactgtggttgtcgtctaactgccgactgaccaggcggcacagactcggtactgtagcatcgcgctcgacgaaggagagcgaagcctgggttgtgttagctaggtgcttccaagatctaaggatcctcggagttaagcagtgtagctctggtcgcacatactgtaacagtcggccgaggtccagacccggcctgttactcgcctcgctgaaaggagaatcattggcccatcgaagtataaaaaatagcagtgaggaaaagagggttgaaaaggactggtgcgtggggagaacacatatggcccgagcgtcggcagataagaaggattcggaccggcacattctttccgtgggattagcttcattgctccactcgctatatatacatcatttacctagaagagagcatatacaatccaccgacctaatacaaggtgtttacacaggggataatgggccactaatcaagccaatacatgaatcctacaaagaccttctaaaatgcgaaagagttgcatgaacacatgaagtaccaagaagtggatatcgttcttcatgggctccacttatactacgtggactacaagcagggcagagtattgaatatttcacgcaaatcgatttgaaaactgaaaaacagggccaccaggcgctaatacacagctaaaaccgaccatgtcggtatgtagcaggtcatccaagatccacggaagtggatcagaaagaagcacgggtggccaaacaagaaaaaacgaaaaacaacgctgagagagtggcacctaccgggtagcagggccgtccattaagtccacggaagacagggggatctgccttcagaaattccgggttagatttcgagaaaaaaaacacgggatgtactcgggagagttttagatggccctagttcgagagaaaagactgctgtaaactgcatccacgacgggttgggcggtgcacatctttccaccgaagtatcgaccattgaggcccttgatggcgttctcgccaccttggacgcggtcgaacttcagatagatatctccgacggaattgggatctagtgaaatgtgaacaacgtggccgtatttcttctcacactccgttcggacgtcctcttcgaggtccttgacccaggttggactgtgctctctgtaaagaagtcagcgttcattctctcatgatggcgtcaaggaaacttacagcgcggggtcaaacatgttgcgcagcaaaacacagcgactagccatgttgacattgatgggaagcggcttagtttcggtcttgggtcggaggaatttctgacggtcgtcaacagaagactggggttcgtcggttcgtgcaagctttctcatcaaagcatccctagagtagttgttgaagtttacgccagcaacatctgtgtcgtcaagtgcactagcaccggcacccttttcagtttctctgccgccagcacggtcaaagttgttggagcctccggcttgaacgccacgacctccctggccggagaacgaagaaccctggaagtttgtagaagcacctgaggcgcgattggcgtgcgagtcgggggtgaacttatcattgccgagaccaacccgaatatttcgtccagcaaggtcaaagccgttcatcttttccaaagcgttccgagcttgatcggggtgggcaaatctggtcaagtcagttaatggaagtgtcaataacatggacggacaacgtactgaacgaatgcatatcccttgcttctaccactctcgtccgtttgcagctgaacgaactcgaggtcgccaaatggttcgaagacattggtgatatccttctcggtaatgctgaagtgaacattaccgacataaagtctgtggaagggtgcggtgtggtggtttcctgctggagcctccgggtttcgggctgcctggcggttcttttccgcttcagtcagttgggcaatgacgggaattcctgcgagcatctggccggtgagtcggatggcggcggagacagactcctcgtttttgaactcgacataaccgacactatacaaaatatgagaaagtgctttaaccaagtaatcatgtgaatacataccctttggagcgaccgttaacacgatcccggacgatttgagcatccttaacggggccggccttttcaaagaaggcaatcaaatccttgattctcaggcgggcagcaagttgctgcacaaagacagtgcgactgtcacgttcatcctcgttcagttctggagacttgcggctggcggcggatccacggcgaacatcagcatcacggcgggggcgtcgttcttcctcacgctggcggcgattgggccggtagtggcgatcgtcatagggagaacgggagcgggaacgaacgcgacctccaccacggtagaagtcaccgttggagcggtagccgtcacggtcacggcgagaacggcgtctctcagattcgcgactcttgctcctctttcggcttctaaggcttccattagcactaacagtgtcgctcttggcgacttcgtctccctgaaggtcacggtcagggcggcggtcacggctgtggtcgcggcgacgacgtctgtcgcgggaacgatcacggcgctcggtggggtccgcgcgggaatccgaagtggcgggggcctcgacgggggcctcgatgggggcggccgcagtagactcaaggagagcctctacgtcaagtccagacatcttgggaggtagcctgttgttgatcagggtagaaatgatcggggtggggatatcactttgtaggggtcagatcgcgtacggggacgcagagttggtattcgaaccctgattatgggatcagagtgaggtctccttggggtttgaccctttttacacgctttgggactcttgttcttgatgaaagtcacgccagaaacgcgacaaaagatgatgggggcttgaagcactgggggtgatggtatagtataaataaatttggttggccgggacctcgggaggcacaaagagggtcgaggcggtgaaaagaagagaagagtcacgtgggatctgagatttctcgccgccttatatatcaaggcggtctggtttctgcctgaggcataagattacgcgttgaacttggaaccttaaaaatgtcagtatacttctatggatacaagcaatacgtttgacagcgcggaagaatctgccttttatttcctttgccccttgatatctgtcggatccacgctctaaagtgtcacttttctttcatctacatctctatgattgtgaaaattgcccacttgtttgcctaagtaggcaaaagttcacccaagtaactattacaaacgacttctgacacgtagtagatactatatagatatagatattattttcttgcattatgattaacggtcatatacactgataagtgatgcttgttttaaaaaaaaggaatcaactccgcttgcaactagcatcatcacaagatatgacatgacaaagtctccccctgagaccaaccagaaactccacactagccaatatacttgaggagtaccgaagagtagtgactcgatcgtactcggcgttaaatcgtgacttgaggactagtgacagccccatattaatgctgtgatttcttgggctcactgagccttgacgcccttcggggcgggagacaccaactcggtgccaaagactcgatcccagaatcggctggtcacgccaaagccattctcgtaatcggcaaaatggtgctgaaggtggtacttcttgagctccttgtagtatgaaggaagactatatggatgttagcatggtttcattgtatcaaagatggagttcaacttacctgcggtggtgcaggaaataatgggtgagatcatagcaaatatacccgaagatgccgccggagaataccgacgtagccgcataccagttgtaatagaatactgcgtgtgccagcttccagaaaggagcggctagtaccacgaatagtgtcggtggcataacgagacgatacttgtccatcgggagatagtggtggataccgtggagcaggaagtgcagggtaataccgacacggttatccggaagatagtggtcaatgtggaagaggaatcggtgcaacagatactcgatcagagtccagaggcacacgccaacggtgaagtaggaggcagcaacgacggagttacccagcccgatagcccccactgttattccgtaggcaacacatggcaaccaaatagttggcacgatgtaccatgcggttttgctgagaggctccaggaagttgccgaacaaaggagcggactcccctccccggtagtgacgaggccgatgaatctgctccaagtagaactccttggagaagttgctgtaccacagctgcagcagaagcggcttgtttaagtccaggaacttatgggttttgtagtcctggctatagtcggtgtctatcgacaggtcctcctcccgagacattccagtagttgtgtaaatgggtccggactcggtttcggtcaccgtttcgatgacagtggtcgtggttgtcgtggttttgccaggtgtcgagacatcggagacaaagccaatgtggcactcatccaaaatttcataggcagcgtcgctgtgctcgtgggagacctcatctttcaggatatccgtcacatcctgcccggcatactccaggatcagatcgccaccaccggggtgcgcgtcgaggaaatcggtgacatcgtaaacgttacgccccacggtgatgtagcatgacttgtcggtgttgtgggattggacgtcggcggaggtcaacgttggcagaactctcccaggcatgttggcggaaatgcaagagaaacaaaataggggaaataggggaaaggaaatagccttggaatagtaggtagaatgggagatgaaaatccgaaaggcggcgaataataagaattaatcaggggaggcgtggcgtgacaccagaagccgagaaccagggatccgcctgctcccggagccttggaaattttcgaatgctcaacttgccattggatcaggcaacaaggttggacagggtccacatcggacttcgatcaatagcctattagaaagtaactccttatttaattcgacacaaaaaatatgcaaggtacgcttacagatgtagttttgtacatctccccatctcatgtcggtggggctgttatatcttagccgccttggagaggcgcgtgagggacctcgggaggaatcgcggtctagccttagctcagctgttaagcttctactctctaacttgcttttcaggcagcttatgatcaaggcggccgagtgcactagacagtagatcggcaagatggttatataagacaggagttgctgggacatgccaagaaagatgagacacgaagccggaaccatagaaatatatcgcctttttctgaagccgaagcattctgatctatcatatctgtgaagacaatggcaaaagcaagccaaatcggttggatagccagtggatgtaaggatcgtgtcttgatgctaatatttttaaagacaaaggactgtagaatatgtacggagtacctagtcaaggatgacaccttgtgctgagacaggagtttgacaaccgtcggaatttataagaagcttacattacctctgccttttcctaacagcctgatgttcccagatcaagtattttcgacagatgtgggagtccctacacgcgtgggcaattttaattaggtttttaaatatggttggttgaaaggcatcataagatttggatgaacctagaatcattatatatacttcgtaccaacgaggcagaaagagaccaagaagatgtatctttggattaataggaaggccaagttggtggatcagcaaggagaaaaaggaagtctagttaggaatggataaaaggagagattaacgtactagtcaccatatggacgtagcatgttctatatttgtacttgatggtcttccagctgtactccgtacatggacaacgatgacttccgtctaaccagatatagttagtacgtcaccacataggctatacctagataggaatagtcagcgccgctatccccaaacaggctagagttatcagttaaactgcgaaaccgctcaggctaagctgctagctcctttgacgagattctcagcaatcctccctaactccgaggcttggggactcagactggatttccgtttgccacccggttgatcggtctaatataaacacgaaaatcagcagccagaccccatattgaccccattaatggagacgatccccataagcacatcggcctgacaggaacagaaagtacctctcgaaacaaaccccgagatcctccagagggaaaggatctgtcaaattgaccaaaggcctatacgaagtacagcatactagtacacatccagtacatgctccgtactctattcagtgggcagtctctgtacgcgcccggctctcggccgggctaagtctccactgagagtctagcgttatcccgcggggctatggccggaacgataacttacaacgctattatgggctatttatcggcctctgcatggtcaattccaattttgaatcagggattatacctcgcactaattagtagtggagatttcagcccctcttccttcccacattctctaacttcttttttcttgtctctcttgtacttgtaatcttccctgtcctcatacgatatacccttctacgctccctctccctccaccgcccacaatgtcgaccgcagagaactggtcccccgagaacccaatcctggcctacctgcagacattagtgactaccaaaaagactcttccttatgggcagcccgtcgtcgtccacgcctctgtcagtcacatcaactccgcttcattgctgcggctggccgcagagatcggcccgcacatcgccatactacaaattccagccgatgtcatcgacgactggtccagcgacaccattgaacaacttcagtacctgtccaagaaacatagatttctactgtgggaaggaagcaagattctgaacccgttggtaaattttatgggcagagcggacgcgccgttggaaacgagacaggctttggccgactttatcaagaagtcatacaccagtggcccattgagaacggcgacatggtccaatctggccacctcgtgggcccccgcagctccagtggaccaacaggaaaacgatgtactgatccctaccttgcgattggcggctcgcgaggccgttgcgacaactgcgaagataatccaaaccgagatctctgccgagatgaataactactcgtcgggcgaggaggtagagatcatcatcccctccacggaaacaagcaacggttggaaagaattcagtccgaataatacgggatcgtccttacggaaatcgtcaaccatctcggtcaccaccgagtccgtgactctgcacgcgcaattccacgcagatgacggtgtcccaactcccccgcaactggcccgcagcgttgcactgtgtctacccggtaccattgacaccgcatttacccccgatttccgccaaagtacgataatcgccgcatgtgccaactccgactttgtcatcggattcgcaacgaacgagccctttttcgtcaatcaccgaggaaccgatatctttgaattggccttattcgacggcaacggaaatccccaagcaggtatcgacgctgcgaaactcgccaccttgccttatctcaacgaaaatgggaaatcgctcggtgtattctctcttgtatcacccactcttagcctcggctttgagtttgatcctgctttcaagcctaatggaagtgaatcatctgcccctggcaatgaaactccatacaaggtgcaatacctataccatgcaatcgggcaagcggtagccctccgggaaaagaacaaacaagaacaagaagcctccggtcttccagagagaacaccggtgggccccaaaatcatgcatattccagtggttattattgtataatgacagacagatagcgcttgttgttctgcatactcgctggccgttggcgagttttaatggcctcattcaagatcggcacctttggacttgagtatgtatgctatacgcccatcttgttttactttttgcgacctgccaatattttcaagcctcactcgtgtcggtacctacaccaaaagtgtctttacatataccaatgaatttgatgaacagataaatggctggcctaacttgtgctcgaatgtaaaatcccgaggtccattgtgaagataaatttaggccttaattatcaggctacaggcacgtgccatttcttagtcatattgtaggaatcgcctccagggctccaccctggccaaggtgggcatggagatcaacagtgaaagtgctttcagctctatagacattctactctatcttctctcgggtcctctatgcattaatgttcgtctttttccttataaagctgatcatggaatcaaattagtatttggttgccaaacagttgacctaattgacatcgaacaccaaccgccatcttcatgaacccattccgaaactcgaaaatactttgctatgacagtacataagacacctcgctggacagaatccccttgattatttacatccaatgtttgcctccacagccacagtttctcgccatatcatacccacagagaccttcgggaaactcgacagccatgaacccagccaaaaccccaggccatcaaagtgggctttctggtcaaaatgaccttcaacagaatggcgaagaaccgccaattacagttatcgccgcgaatggggacctaattctcgagtacatcgctcccggcgactcttcgtcgtcacccaccaagcgcaaatggcaggtggcaagcgagcgtcttacctcccacagtccatatttccaagcactactggatcccaccaagttctccgagggaagacagttcaatgcccagaagcaagcctggaatgaatcccagacaccagacccagcctcacagcatgcgctaccaacggtcaggcttcctaacgtccgctctaccagcatgtgcggagaagatgccattgagttatttttgaagattctttgccttgattctttggatgaaaacgaaagagctgtgtttgaaaatgagttgaagacccagtctacatcgcttgttgcgagaatgatcgaccttgccgattcattgaattctcctcgtgttgttcaggatgttctgcagaggattggatatttatatggaaagtcaaagactgcgctccttgccaggtttaattcagctttgttatcaatgaaggaagatcggattcgacagatcatcttcatatccgccttcctcgatgattcacgactcactagaatcatgacccacgccttgctggttgtgggctccagattctggataaatgggctagttgcccctgaagaagaatctttgcgctggagatatttaccaaatgggttagaaggtgggtttccattaatcccaactagtttccgttagctaaatcatctttctgcagaggaaatctattgccgacgtcaatatgttttgaacaccatcaccgatctacaggctcatttccttcgagtctacgggggtctggaggaaaccgacagtgcaaggtccgcagcaaacaacagaacattgggcagggcattcaccgcgtctgcacatacgctttttcaatctcgtcaattccaatgccgaggcggattcaacaacgccagccagtgcgacctcttccaactcggccagatgatccgatttttctcactgcgcgccagaacgatcttcctaggatcgacattgatagacccggatttcgactcagctccccacgacgatggtcacacagctggcgaatctaggaacgaccaacctccaggcccaccatctgatatcacagccatcatcgcctctatcaaacaatatcctgattatacaatcgacgaagcgcacaccggctgcggtnnnnnnnnnnnnnnnnnnnnnnnnnnnnnnnnnnnnnnnnnnnnnnnnnnnnnnnnnnnnnnnnnnnnnnnnnnnnnnnnnnnnnnnnnnnnnnnnnnnnnnnnnnnnnnnnnnnnnnnnnnnnnnnnnnnnnnnnnnnnnnnnnnnnnnnnnnnnnnnnnnnnnnnnnnnnnnnnnnnnnnnnnnnnnnnnnnnnnnnnnnnnnnnnncggctgcggtgtgcgtcgtcgcattatgcctgctttagagtgcatcgaaaaattcgtcttggatgaccgcggtctccttggtatcacccccgcagtctcggatactgctgtttcagacccatctcgaccctcaaaatggacgctttggtcagacttcacgcgcaagaaacacacagtcgacatttcttttgcgagagtcacggctgtatactacccttcggcgccgtcgaaaaatcaagccacccgctccactcaagaagaacttggacggctgttgtttactgctgctcggagggattggagtgcggcgggctcagcctgatgcttcgtacatgaataattaaactatttataccacaattcagaaacgccgggtgatccctgcgtatcgtcctaggccgatttaaaacttcatggtatagcctactttattatgacttgtgaaattctagagaaacggtggagcttgtcattgccaaactctagaagtctgacaataaatggtccgcattagattatgtcctgatcataagcgagtcaacccccaactaggtcatcaagtggagtttagcctgtaattgagtattgctcttcaattgaggaaagactgccagagatagctctatatatgattatatgatcaatgtatagcgcctagaggcaagtctgctcgttagcgcagattatttcctatgttaacacacagtagacataaacaagagagagcacatgcccagttgccaagttgggaattctaggtaccacgtcacaatgattgaaaacccaccatgacgaaatccgtcgccccctaacggcgtgtccggaaatacgacagaatgatccaagagaattagaagagaagaaacagtttcggccggtctagacttcgtgttttcgatctaggggtgcattccggctggctccagcatatacgtccagaccttgggagtacatgggactcgatgatctggttctgggagaagcttaaagttggaggttctgtggatgcgaggagtatatgtggactatggccttggattgtagtgatcgatgtatattagtgtacataacagaatatcgtatatgtttctttgatgccaatagacatggaatgaagcgtttaagtatcaatcaagacaatgtataccagcttccacaaaacaatgaactcgtgtatcgaattgtgacttgtagatggtctgggagaagttcagagaaacaagaatcacttttctctatagtgtctatatgaagacaggtgtggaattttctttcttttgatggcatgcaaatgaagcgacagaagaaaagaacccggatccagataactgcagagatatttttccaatttgattctgcgtcaattttgactttgatttttttctttttttttttttcgtatgtccattcatccacatagatatcaaccgttcaacataccggatcaccccagaagtaccccatgtcaagatccatgttcggaccagaggggaagaaagagcccgtgatctggccggtggctgggtcataggggaaacattcgtcatacgagctccgacccgagagatccttctcttgtttgatgaactgatcgagtagatccggcgcctcgagactgtaggattcagacaagccgagaggagtgttggattgatccatcgcggagcaggtgattgagtccagctcggcggagatagcatccaccgccactgctgcgggcatagtcgcggacggatcaaatgccacatcctcggctgctggctcttctgccatggcggagtttgcggtttcagggatatcgaagagggagtctgagtcttcggtgctggggaaatcattcacgttgattccgatatggggtgccaggcggcggaggaatccgtcgcaaagcttccaggctctttctgacgccatgttggtttttgatagtgtcgatagccagtccagggctttctttgcggctttggagaccatcgtctctttctccgggacatgctgcgcccggaatgccagctcgagtaggagaacagtaaccgcctgcatcagataatgtaatgtgcaccaccatggcgacatgcggtatagtagaactgcatcgggggtgtccgggaatagtgtaagcatgtggcatgcagcctcgacacattccgccgcggtcttgttgcagaactcgtaagtcttgtcctcctccgaggggggttgatctaagcgacagaggcacggccgggtgattccgattttggtgctgtaaaatagaaaggcgaggcccattcgctggctgatagggcattgggatgtctgtgtcgaggtgaaatcgtatgcagcaggaagattcatgaaccatgaatcaatctcaagcatcaggctcttgatggtaaactcggtgcttgcccatggagactgcagcgcttctgggctgtagagtttcactgtcacccgcttggaaatgctcgtcaaggaggccagctgcaagaagtaaagtgaagtgcaaggcggaagactcttgagatactcagctctgctcaattttttgtcgccctcagcaggaaaatcatttgaatcagaatcagccgcagattctaggtcctctgcgctgctgttggtgggcatacgctcggaaccactggatgtacggaatacagccgtgcctatcagccgagccacttcgtctttttggaaatcactctcgtcaaaaggaacaggcattggtgtggtgcaggagctgtcaatgatacacgagggacgcccagtcatgatagtaagtagatgatccagcgtatacaatgaccaccataccctgtagcgtatctctttggaagtgtctgatatgctcgtaccaacgttgcgcaagtgcaatccaagagccagcgctcctcgaactgcacttccagagagtttccaggccctgcaagagccgatattatgagtatataattgggatttgcaggcttggcaacttaccgattgatatgtcccgaggccactagatagaatgaagtaagcccctcgacttgcaattgctgtaggtcaggatgatggagaatttgatcttccaagctcaaggcccgcgcccttgaaaagtacatttggtggtcatcatcctcttccttcgcgtccgagttcgtcagctgcttatatttagccgcaatggcaaagatcaggttgagtatagcgagccacttgtttcctggcttgagagaaggttgactgaaaaagacctggaattgggggacaaaggttgaaaccccaatgattgggaaggatggatgcactgaagtcagataggcattgagcattttgcctgccatttcccgggatgggactccatacatatcactttggtctgcagtcggaatgtctagatcatcaagataatagttggaagccactacccatggctcgcttagattctccggccgaggcgttagagttggagagggcagaccgttatcgtcatctgtgttgggaagagttgacggccaggcctcaaattcactgttgatctctttgctaagcctttggagccaagtaatctcagagctttttccaatgaaacccgttgctcgtgcagtttcatctctgttgaagtcctcctctgtttggtcgccacattcaagaggactaacagatgatgcgcgggagggtggtggctcagaacccgcatgccatgagatccttcgttctccagcggctgcaaggcatgtttccgggttgaatgccaagtcaggggccgattcctgggttggtattagacacagtcatcggatgtggatcaaacttcataccgctgccagggcaatgttcacgagttgctcatcagacacgccaaaacgattgctcagcttgctaatgacatcttcatatgcctgcacctttgcggataagcttgccaactgtcttttgtttttagtagatcatagacgtcagctcttgtaatgacggtgcactatatattggcccataccgcttggacttttcccgcttgccatcggtatagcagcagatgattccagcctctcgacagttgcggcatccggacttgtctccggtgcactttgtcttccgttgtctgcaagactcgcatgctcgacgaacgtgtcgacggtgaaacctgccaggagaggtgaaggcagattcggctccttccgctagtcgcgggatagccattttcttgccaacttcagattcaccttggagatgagagactgggttatcctatagatgctttatcagatcatactccttagcttagatcatgatttcacacttaccacactggaaaactgattacacgtgtctgcatcagtgcatgataatttgaagaggctctgttgctcattccatgagggaaatggaatattactcatggtgaaccatataaagattgaagctgtccactgagtgtcagtagaattcgcaactacatcttcctctttacttacttggatgaataaaggacaatgtctgggtcccaagagattttgatatatattgaaatgacaatatcaggaattgaccaatgggctgcagtgacatctgtcaaatcaaatagtcacaatgtgaagacgagaaggaaggttggattttataaaacaccccaggatctgacccacgagaaacatagactggggaaggacaaaggagaagaaaggttcgggttttcgggcaccgttgggaatcttaagctggtcaagctagatagatactctgtgatgacatgccatgctcgtttagggtaagccaacggcgcattattggctaccagtccaccgaattagggatagttgatttgcctcaagtgtccttgtagggcatggggcgaataggtcaacgttttcatgagcaaaataccttcttttggttattgaccacactatttgccatcaaccaaacattcttactccagagagagcctgaggtattggcttaaccatcagactacctcccccggtgatccattgttgagggtcagctttcggttgttagtaccgactagctctggagtccgatgtagtgaccaaggatcggatgaaagaggatgtaagctacttatacagagtcaacaacgccttcaacctcaggctgttcttcaattgaagttgtatgtagccaattccacgtaaaacatggaacatacagcattgaggcttagaaagggatatatagaccagtagtaaatagtaaacacctagtaaataacatccaggcccagacctcttcgaagtcaatctgacgtctggtggcgccacatttgacgttggttcgtccctggttggcattcaggccaggacacattcggaaagggaagagaaagcttgacggcaattctcaccatgtcttgtgtgtacgtaccccgtctttttgctctgcgagataatcctgacgtcccattacgtgatgattataaccttcaaatagggccttgtttgtcaggcaaccctaacaatttagaaaatgaactacagttatggatgttctgagcttatattaataaaagttaaaaaggaattggcttaacacgatcttggaagtaaagaacacgatccgaacatcattaggaactctatacagtagtccaggcccatttttactcaatgaggaagttgtctgcaacactgcgaacttccttcgagaatgcaacaccctcaccctccatatccagtagggaaacattgttgatgtcgacatccacgaaaggcttggtcttcgtgaagtggacactcatcgggaagaattcattctcgtcagcatcaatcgcctcgaactcaaagctgccagaggcattcgactgatcaacagtgcccaggttccagtccagactgtcaccggagacctcgtagaccgcatcaaagctagatacagcaggctcggtcgtgccatatggaatagtgacgaccacatcgcggagactatcgtcgcccgtgagctcatactccacagtcaccgtggtggagtcagagcccttgtttacccaaacggtgaatgtgattggaagaatatcggcattatcagccgaactggcaacacgccaccggagaactccgatggagttgttggcagggaagcgcttggtagtgtccttcagttggatgaccgaagagttggtgaagagagctttgtcgacattagggtgagtgcggaactgtgcgccatgtgtgggaatagcctggcagtcgagtcggagtttggtgagtgagggatcactgatacggagttgcatgtcacccttgacctcgaaagatttcaaggctccctcccgagtaagtgtggctgagatggtctcggcgattgtgagttggatgggctcccgatccgcctggagagactcgcgggctgagggaatgtcatgcactggagccgaagctcgtgcagccaccaatgggctctcctcctcaatttcgggccccatatcaccccggaccttctcgtagatatccgttgcctttgatttcttgcccagttgcatgcccttgccgcgggtgggaatgggcctagtgatcacgcagtcagcagtagtttcgcaacggtgaaattagaaaaccaaacgtacttggaaaaggactgtttcttttcggcctcgtatgaatcatagctgtcaggcacggaggggcgcgctgggggtgtgtagacggggtaggttggggttcttggggcggcggcgcgacctgtgcgagcagcctctttgcgttgcatttccagctgcttcgcctttctcttgcgctcctcgctggcctccagctctttgttctatcaatgtatgttagccatgaactaatttcactggtgattccacatacccgctcaatgatttcctggattctctcctcatgactctccatttccaggaaggtcttgatctgagtgagagaaaggttctcccggtatcccatagttaccaattcatcaaacgcactcaggagctcaaaggcattgcgaagaatctcccgctcgtctaggctcttgcagatgctggtagtgacttgcgcaaagagatggagactgtcgatgtcttggagaatgttcgattgacggttggtgatcagcacgatatacaactcatccaatggttggtacacgaagcgcacgttgtcttgctcgacagtagtatgctgggttccggagtctgccagcttagggaaggaggcgagaagggcttcaattcgggagcgggagatctctcggaactggcgcgagagaaccgctttacctccacgggtgcatatcgacgctgcgagaacaacctgttgtgtgttgattagtccaattccccgcggattagattaaaacaaggacttaccatggtgaaaaacagcacagagggagcacacaaatgacaggaaaagagtgatcaaagaaaagagtacagaaagtgatagagaagcgtagggttgactggaagcgtaggccctgatgttggttggcggcggtagggagctactctgttcacttcggcgacggttggcccgtgcattcacttcgcttagtcgtcgaccagatactttctttctctcttcacttcatcttttcccgcgcgttgaattccccaccaacactcagttcatcatctctcttgctattactcgtaatctttcactctgcgtatcgccgaggaaacttttctctttcactctcaaaccccacttcaaccgcgttcatggaacgtcattgctgaagtttccaatacgaccccagatctcattttcacgcgtttacttgctatgacaacagctcccttgatcgcctaccccacaatggaagctcccgctacgggtgattctatggagatggcctcgccctaccaagggccggctgacgatttcgatatcgacatcgacctcatggaggaccatgtctcgaacatggatagcgatatgatgggcgcagaggaatttacaaatacttctcagcctactgaactcaacaatgatgcgatctacgatgccgacatggccgatgaaccctccgaagggtcgatgatcgacgctgacaactacgccgatgaagacaacgatattgacgtgcaatttgaggaagagccatatgaggaagaaatgattgaagccgatcaggtggaggatgttaatattgccacccctatcattcatcttgaacctgccggccgcaatgaagatgctgccagccccattaaggaggatatcacagtcacatccgtggaacttctcgaagcagcacctcaagaattaagcgactctgcgggacttgccccagtttcagacaaagcccaggtttctgaagttgaaggccaagacacccagacccacctgagcacggctgttgatgaccttactgaggaaccatccggaaatgccatcagtaccgaaacccgcggccataatgaaaaggcagagcttggtgaagaggctaacgagacatcaaagtctcctttgacagaggctgaggtaacgcaagttcccaacgaagacccggagaccagccaaatcaaaccttccgccgaatattcccacgatgacgctgcgcacccagaggcgcagcctgtgtctgaggaaaatcaccaggttgcagatgaagaacactcgccccaacaggtcacatacatggatgaacctcttcatcccgtcaaaattctctaccaggattgcgagatcgccctgtttcctcccctcgagggagactcgtcggatacattcttcattgaagatgaagctttagcttacgacaacgttgatcaaatcttcaaggctctacgccaggtgcttcaaaaaaccatggcaggcaatgaggttttggtcatcgatattgacactctcggtatccaaataacagaggtaagtactctcttaattatcctcctggcaaacgtactgactcatcctatcaggactcgatccatacatcccaggtaaccttgcatcagattctagatctttacctcagactttgtcgtaacgatggcactaccgatcccgaagccctctaccttacactgagcaccaagcgtgcgttcccggccgagatcgcagatctcaatgacgctgcaatggaaggcaagaaactttctgaacttcattccgaacttcaatcttgggatgaatatgatgaaggcgagccaggttccgagggggatcttgttgctcatggggctgaggagcatgaagatgaactctactacaccaatgaggcccaaaaagagctatcaactacggaagtgcaaacggctccagcacctggagaagatcaggcgttagatggcgaacatcctcaggtccagcccgaagctgtctctggtgctcaatcagagattgtgcatgcgcaggacgaggatagatctacctccagggagcggagtgccgaggccgcacgtgagcctgaatctcatccagcccagcccgagaacacagagccagatcaccttgatgtgtctcgccatctcgaaacagaccaagatcaggaatacgatcatggcgatggcgatgtcaacgaagagaactatgattccgagggccggcagagtgattctactgccacgttagctgcactgcctggcgcaagcgagattcaagagcataccgagcatgcccctttggacgtttctgtgaacgccgtcacagatgaaaacgacaatgatcactattacggagagaatgccgagaacgatgatctgggagatgacgaatattatgaggatgacccggtcgaagatttagaggctttccaaaatgatatcactggcagtgaaaatgctgatgatgctcaagaaccagccgatcaggcgcctgtctttgatgaagaggacacagatgagttagatgccccgccgacagacgaagttgtctcggaaactaccttgcgtgatgaatccaagcacttttcccatgaccagccggcaccgccccttgacagcggcttgcatgacacctctgacaagaaggagaaaacaccagagcctgcagatgatttacttggaatcgctgtagacctgatgcagactcccccgagagatacagagaacgatgcccttgatcactttgagggcatagactacgacgagccagaggatgaactggatgcccctgttgcagctgatgatgggggtgccaatcacgagtttgacgagaaccattttggcgactatgacacccattttgaagagtcggaggctgtagagttggttggaacagatccttcctcgacagacgccgaaacccacccgaactcgtcttctaaacggtcccgcgaagatgaagatgactgggacttggtggaaagcaccattgacaccaaacgtcgccgctcttcgtaaactatgctcccattttttttttctttactcctggagatttctccaatctttcttcgtcatgcctggtgtccagcgagtctgacctttgatgacttgttccacgcgacccataaccctccgacatactgttaaccatacttgccagcaacgacctcaaccgatggacgcagtgtctcgtctcactactaaccaaaacaggtatgtcgacccctttccccagtacgcgcagcgcacgccttcaactttctcggggtatgcgctttctctttttttcatcccgcatctgaatcaaaccccggtgccctcaactcgagacatcattcaattgcccgtgatctcttcctgcgtttctttcttttttgtcctttgactctttccccattgcgattcaagataccactgccggtcttcggccaaaatctttgctttcggtgttcatggatgcccgtttgggctgcgtgcttttcgatgcatttccttagggtctggcgtatcggcgcgatgggctagtccacgtggttgtagtattctaccaatgaattttacccacatcttttagttctcaggcgtctcaacttgtaaatctcaagtataaattaagaggaatctaaatgtccgatctcttacccccagatttgaattagctaatttcgcttatttagttatggggcccaaatgagaaacattccggggagagcgggtcggcatagtgtagaatagatgtacatgtatgttttgcaggtataaggaactatagtctatatgtacgatgtagattgtacgctattgtacgttagtactcgatgcggatggtttatttttacattcaattctatattgattcagccacgcaagacgatgtcatgctatggatctaaactggagttctctagggattccaggctaagtatagaaacctacgccgcattcggcgggctgaaacgccggtcttggcctcatttcagggtccatatttaataaatacaaagatgcaaagatacgccgttgactagctactggactactgcttttacctctaggtagaacctggggacagagggtgacacatggtagtgttgtgtagataataatgcactaaatcgagtcgatatgtacaacatagttaatagtacggagttggggccacctatttcaatctacctcgatctctgcatattttatataaaactccagaatgcaaagggaaattaagattaaaaattacctaaagcactgcaacacggcacttgaaccttggaaagcctccctacgcctccccaagccctctagccctgttgttctcttacgcgtcccccgatcgggcttgaaacggaaccccaccgcacgcaggcacatctctggcttctggcttgcttggccatcacctcactatcttcttcacatcctccttactcatcagaaatctcgggctggctcgtttttctgttttgtccttattcgctccctttgcctccccctagtcccgagcctttagcctattaccacgaccccttccttcgctcacccgagtctctcgctcattccccgacgcattgccggcactggaggtctttcgacagtaggagctcccggctcctaagataggaatcactcaagatgcttccagataagtacgtcgcttccacccgccgaattggcccacgacggcaagcttgtcagttctaacatggttgcgcgctgcgccattatagatatgtcgggcttattttagccattgtatcgaccatggccatcggcaccagttttgtgatcaccaaaaaggttggtgtgcccatcctccagaaacggacgcttcgatcccgagtgcgcgagacaaacaccgcggcgattcggtccaaagcgatcatcatcggagcggagtcgctaatgcgtctgaatacagggcttgatgcacgcctccgaacgacatggatttgagggcgaaggtttctcatatttgaagagtcccgtgtggtggggtggtatagtgacacgtacggaaaccaatcgtcagattcgacaattcgccagatgctaacgggttcatagtggctcttggcgaagtcgcaaacttcgctgcctacgcttttgcgcctgccatcctggttacgcccttgggtgcgctgagtgttctcatcgggtagggatctcttcaacatcgtgcattcgcctcatagctgacatgacacaacacagtgcggtcttgagttcgtacttcctcaacgagatacttggtgtattaggaaaactaggctgtgcgctgtgcttgctgggatcggtcgtcatcgttctccatgcgcctccagacaagcaggtggagaccgtcgatgagattcttggatatgcggtccagccaggtacgaagacttgatcggtgtcgcccaaaaactaccgctgactttgcgactaggattccttctttactgtgtcgcagttgcgatcttctcgactctgatgatctaccgggttgcgccggtctatggcaagaagaacccgctcgtctacatctcgatttgctccactgttggatcggtctcggtcatgtcagtcaaggcctttggcattgcagtgaaattgaccattggcggcaacaaccaatttgtccacgcgtccacctacgtctttgccattgtaaccggattttgcattctgacgcagatgaactacttcaacaaggcattgaactctttctcgacttcgatgtgagtgcagacatcaagtaatatggagatgcgaggctaacatgattcttcaaacagcgtgaacccactttattatgtcaccttcacaaccgcgactctctgtgcctcgtttattctcttcaagggattcaacaccactgacgccgtcaacaccatatctttactctgtggattcctcatcatcttcaccggcgtgtacctcctgaacctctcacgacatgacccggatggacacagcatggtgaattcaaaacttgacgaggatggagtgccaacagacggtatgacgagtttccagacccgtcgctcaatgcagtcccgccgaagcgagtcgagtgcatatttcaatggcaccagcgaccgcgaaggcctcatacacgcatacgatgtggagaacgggatcggcatgaacaacttgaccgaagaaagtaatggggagccaggcccgactttcccgcggacggatacgcagactgcactgcacacgaagcggaacagtcagctctgatcgcggatgtctcaaggtcttccaatcctcgccttatatcgaggtctttgaaattattctccttcgtctttacacaatcgactgctagcaagcttcccttccacgggcttgatctccacttgtatttttactgttccccgaatatgccagagttgcattgaaactcgggcgaactcaggcactggacatgtctgtatgaacgactggatatgactctgggtttctctggatggttgggatttgatgtctttcttcttctagttccttttttttctttttttttttttctaccggtgatctggcgtgccgagaggcttgtatatagttcaagttggatttctgcagaatagactggcgacgtatctgggtggggctgggccgatgatgtatttgcaggtcagctgtttatggaacatgcccatccgagattcttgcttttgcaattccaagttcaacatctttaaactattgccggttcttggctacctttgcgaggggtctatagacgtcaaccttggaagggcagagtgatactcccctcgaacgcggggaactcgcgcgatgcccactttattgcgcaaagtggccatcgtcgccgcagtcgacggtctggtcctacatcctcatgccagcgggtcgcggcatacgggtagtaacaatgaggcgtcatccatccgcatcgactataagacaaacaaaatcacagcgttgcccgcttccggcccggagcccctcgatggaaaggacgccctagagctagaggcctacggtctcgtaggtatgttgacgaactgagtgaaaaccgaaatagaaactaaccgcaatgcgctactgccacaggtctcttatctgtcgcttcaagttcattcctcgtttccatcacacagcgccagcaagtagcgcagatccgaggccgcccgatctacaccgtaaccaacgtcgcgatcattccgatctcatcgcaagccgatgcttcccgcgcaatcacacaggccaggaaagaatcctcgcaacaggaagccaccattgaatcctccgatgaagaggacctgaccgataacgaatccgacagagccgatgcggaagcagagatcggcagcgcgcccgcatcgcccactcgcgatgcatctcgtgtccgcggcaccagcgtcggcagtatcgcagaagacgtgatagcgaaaaagttccgcttcggcaggtttgcggccgattggctatcgcgcaaagacctgggattgcccaggcccggaactcaggagcaggatgtgttggagtctcccgttgacgaagcctccactcctcctccttcgggtaatggcagtgaggtgaatctcgacgctgtggatgagtctctgtctgaagaggctggggctcagagcgagcctgatcggcctaaatctgaccaggctgcggaattgctgccgaaactgcttcgctatacgaaacttttgtttgcatcgcataattttttctttgcttatgattatgacctgacgcgctgtttacatgtgcaggaagctcggaaagatcagcttcccctatataaagctgtggatccattggtatgtgcgaactgagggcttgtagtatgtttgaagattggcgtgctgactcgttgacagtatttttggaatagacatttgatgacaaaattcattgaccatggggctcatggatttgttctcccgttggttcaaggctttgtcggccaacgagaattcacaatcgctggtgctgaaaagaaacaaacttcgaaggactcagcagaactcgcgaaaggccgaattctcggtgaaaaagacgaggccgaagctgtggagactgatgctagcaaacgtgattatctattgactatcgtttctcgacggtctgtcaagcgaccgggtcttcgttacctgcgccgtggtgtcgatgatgagggcaacacagccaacacagtcgaaaccgagcagattctctcggttccggattggaccccgtctcaccctgcctactcatatttgcaagtccggggttccgttcctctttatttctctcagtcgccatatgctttgaagccagttccagtgctccatcactctgcggaaacgaatcttctcgccttcactagacacttccgagagttcagtcgacgatatggaaatatccaggctgtctctcttattgataagctagccggtgaactgaagctaggagagcaatacgagcgatataccgaagccttcaatgccgccggtgggatcgatggtaaaccattgaaacttgaatggtttgacttccataacgagtgccggggcatgaagttcgaaaatgtatcacgactggtcgaccgactgaaagatacattgaatgagttcagctataccatcatcgcagacaacgatatcctgcagacccaaaagggcatcatcagaaccaattgcatggattgtctagaccgcactggtgttgcccagtgtgcattcggccaatgggctctcgagcgtcaattggaaaatgaaggcattgacattgacattggtggtgactcttccacccaatggttcaatacagtctgggcagacaacggggatgccatctccaagcaatattcatcaaccgcggcccttaagggagattacacccgtacacgcaagcgagactacagaggtgccctcaacgacttgggactgactctttcccgctactacaataacatcgtaaacgacttcttctctcaagcctgtatcgactacctcctaggcaacgtctcaacccaagtctttgacgagttcgccatccagctccagaccaccgatccaggaatctcagtccaaaagctccgccagaacgccattgacacaagctgcaagatcgttattagtagcccctctgaagaattcctaggtggctggaccatgctcacaccccgccaacctaacacccttcgcaccctaccattcgaagaatcagtccttctcctaaccgatgccgcagtctacagctgccgcttcgactgggagaccgacaaagtgttgtcctttgagcgtatcgccctctgctccatcgagcgcatccactacggtacatacgtcacatccatattgacagatagccaagccgacgaggcgaccaacgtcggtctcgtcatagtctaccgcgacggcgacacaaacaccctccgcgtgaacacccggtccctgcagagcgatgtcgatctcagcacgctagagactaccgccagcgccaacagtgaatgggacctcgtttcctggctgcggggtagcaagcgtgcgacgacacggtttgttgcattcaagggcctgccactgtcaagtccggtcgctagtccgcggcttgggcctactactggtactgttcgcgagattgatcgcattcgctcggtctgtttggatatcgagcgggcgatgtttgcgggtcagggtgataaggctgaggcggtctctgtggttgaacagtctgatattatctctttggcggatgcgagaaagaggactgggtggttggaatatctggtttatgaccttaagaagatggtttgggcgtgattgctcttgtgatatagaggtgagttgcgggatttctcttccgcctcttctcttacatggctttcactcccaggttattggatcttaggtcattaacatctctttaagtcttttgcatatattccttagcattatgttgatagtattggatgtgtcgtaactgtcaccgatctcgaaaacatatgatcaatagaacagacagtttggaactatttgcttagggatttgacagtaagagcacgttagtatagtatcttagagataggcactgaaattattactgttctacaatatatcacccgtgcactgcctggtcaacatgtcacattttggcggtgtcagcttcaacctcaacttcatccaacattctaaccatccactcccatttccaggctgaaattttgcacacacatatcatgtgaaatgcagactatcctttcttcgcatctccttcttggacttgaagtctacacctaaacggactgaccgcctaccgtcttcagcaatcctttttttctgcccgcagcacatacacccctcagtctgaggtcgtccccgacaactgatctgattccgaccttactgcgaaatctctttggccaattacttctcgtcttatttctggatctgccttagcggatcgcagatttcagtcttgtttctttgatctggggcaacgaagggggcccgttcccacattttcggcggggctcctgtgctactcgcactttcgacctacatctgtcgcatcgagtcttcacctaagacaagatgaattggcaacctcagcaagagccattgaggcagttggctcgctaccttcgcgattcgctcaatgggactaaccttccagcccgagcagaagcagaacaggtaccggcgttccctttttttttttttttggtcctattgagcttcctctcaactgcgatcgccaatacactaccccaagatggaaactaacgttggaatcttttgttaaatagatgcttgcacaagcgacctcttctcctgattacgtcaattacatcacctatatcttttccagtccgcaagctgcttccctggcgggaattaacgagaacgaatggcctaccgttcgattttccgccgccgtaaacgtcaagacgaagattgctcttgcttacagcacgatatccccccaaagcttggcatttatcaaatccgcggctctggttacactgcgcgacaccgaccacaatgtctcaaaagctgccggtaacattatcaccgcaatggtgcttcacggaggccttttggcctggcctgaaattgtcaatgagctgttgacgactgtcgctaattccaacggggatgtgcccatgtcggctagagaagctgcaatggatgcgttgtacaaggtctgtgaggacaaccgcaaggttctggaccgggactatcagggtcaacgtcctctggatattatcattcccagcttgctacaattcatttcggtcgacagttcgcgcattcagattgctgctctcaacgccatccatgttttcttgccattcaaacctcaggcattgatggactcgctcgaccagttcctttcgcaattgttcaggattgccggtgatgaaaataccagagtccggcaaatggtgtgtcagtcgttctcccaacttgtggagactgccccggaaaagttggccccgcatatggaaggattggtcaactacatcatcatgcagcagcaatcccaggatgacccagagcttgcacttgacgccgccgagttttggattggtgctggagagcaagagcaattgcaggccgaattggcgccatacatgcacaagattatcccggttcttcttcaaaacatgatctacgatgaggaggaggtggctcggttgatggacgagcaagacgatgccgacgccgaggaccgcgccgaggatctcaagccacagtttgccaaatcgaagggtgatcgtctaaacatgtccaagccaggtgaacaaccagaaggctctcgcatcatcgagcaacagacagacgatgaggacgacttaagtgaaggtgaaatcgaggactcggaattcggagatgacccctcgggtaactggactttgcgcaagtgctctgctgctgcgctcgatgttttctccaccgtttaccatggtcctgtctttgaaatccttctgccatatttgatggaaaccctgcgccatgagcagtggccgaatcgagaggccgctgttcttacattaggcgcagtcgccgatggctgtatggatgctatcactccccatctcccagaattggtcccttacctcatctcactcctcaatgatgaccagcctgttgtgcgacaaatcacttgctggtgcttggcccgttattccggttgggcagcccacctccgcgatccagcccagaaagcccaattcttcgagcccatgatggaaggtatacttcatcgcatgttggacaacaacaagaaggtccaagaagctgctgcatcggcatttgctagcctggaggagaagtcagaggataacctggcgccctactgtgagcccatcttgcgccagttcgtagcgtgcttcaataagtacaaggaccgaaacatgtatatcctttatgattgcgtgcagacgctcgccgagtgtgttatgaacgagctggcgaggccgcatctaatcgagatcttgatgcctgccctcatcggtcgctataactacatttctgatgattctcgagagctcttcccgttgcttgaatgcctcggatatatctctgcagcctacggcgatgcatttgcccaattcgcgccgcctctcttcggtcgctgcatgaagattatttacggaaatttgcaagcttctattcaaccgacacacgccgcggctgacgagcctgacaaggacttccttgttactagcattgatcttcttagtgcaatcattcaggccatcgacccacaaaagagcggcgagcttgtgagtacttcacagccgtctttcttcgaactcctccgctactgcatggaggatccaaactatgaagtccgtcaatcaacatatgctttgctgggagactgcgctattagcatcttccctcagttggagcccttccttcccacccttaccccagttttgatcaagcagcttgacttggatctgattcgcgatgatgatcgtcacacgggcttcagtgttttgaacaacgcgtgttggtcgtgcggcgagatcgccgtccatgagaatgccgcgcttgcgccctacgccgagcaactataccaagggctctttgcaattatcattaacgaggaaatcatcgattcggtgaacgagaacgccgcgatggcgctgggacgattgggattctgctgcgcggaccagattgcgccccatttgagcgagtgctctggacctttcctgaagtcaatggacaagattgatttcacgcgtgaaaaggcttccgccttcctcggattcaaccaggtggtgatgaagaatccgcaggccatggagtcgagcctcctcgactacttccaggctattgcctcgttccccgcccgctcactcgcacaggaagagtaccgggacatccaggtgtctttccaacaggtaaggttattttccctagttcagtcacatgccactaatcaagatgtacaaataggttcttcagggatataagaccttgatccctgacttcagcaacttccttggccagctccccccagccgtggcccagacactacgcaccgtataccaggtctaagtcgaacttggtgattctacttagatcttgaccgggatgtcgggttatgtccacttctgtctcgaatcgggcgcgattaggttagggaagagacacgagggatacccgggggattagtaaatagggggtcagcggccggaatttcacgttaatagaaagaggagggagaaagggggggcaaaatcatgggaaggagcatctgcgatttagctgtttttttacgttacatctcatgattgcaacaggggcacgcaagaccctttatgatttctatttcgttgactttgctttcttcttgattcttattttgcattctttgtgcatagacatcatcaaggcagggctggctcataggttgcttcatttttttttgcttttttgttttctcagcgctggtttgggggttttttgcgtggcatattcatatccccccctttagatagatacctagatagataggtcttcgtcgttaatgaagatctcaaacaattttctgagagtctggcatgtagagtttggcatgttgcagtatcctatagtttcggaagcatcttgttgagacgtttggcgctctcctaggtatcttttcccgctatacttaacatgctgtctcactgactagaataaatatccttcatgtagtaagacgtaaaattgctaacaagtatcattgtgattatcagggttgtccttgacggtgctaggttcgccatacccgttaatccagttagtatagacaaaccaaacattactactccagcaaactaaatatagtcagttacctagcattatttctacgttagcacttttacctgcctctagaacaaagctggacagtgccagcgaatatcacacctattccgtccacatatccccggcccccaggaaatcaagagcacgtaccaagatcgactcgctaaccttgaacagggagtggatggaaaaaaattaagatcagcaggaccctggcaatctccgaccagctgcaggtttatttttggctagacagcatgcacagctagttaaatacggagtaactagtcaagtactttgtagttacttgctattaataacctagtagatgtataccacatccagcatatacatcaccaaactgtaagaatagaatcaagaataaacaaccaagcatccaatagacctctgctgcccatacgattcccatcaagccctaagtcccaaccaaacccaccacgaatccttcattccttcatagcatagtaagcagcaagataaccgtagcgaaaagataaataaaaagataaccagtaatatccaactcccggctctcgcctaactggcgcgttataattaactcggcagtcgaaaccaacaacaccctccccccgattggccgctcagacaaaaaccgcccgaaataccaagacgcgagcctttcccttaactactctttttcacgaactcggaaccgaccccaccttatctcaccctgggatttaaataggtgtcgatggcagaccgttgatgcagggtgcagggtgcaatctatgtatgtacctacaggtaccccgtagcataccgggcgtttggttcttagtgctgcgtagtgcgccattgccctgggccgtgtgttggtcttgttggtctgggctaactaattgactatgcctcttgcggcttgggatggtgtgatggaggctattgtggactggatttgggactgcttataggtccaggtgttgtgttgtgttggtgcgaaccgggctttctttggattatacttcgtacatattaatcctctcagggtcttgaaatgcgtttagtgtttacagttataggttttgactttgtcgggtattattttcagcctcagttgtaatattctcttggtatcttgtccacgtccggggtacgcttgcctcaactcagacctgagacctacctgcattatgcatattaggaaggttaacttccaaatgacgggaagctaagagttaaaccagatttattcccttctctaaatcacactttgagagaggcgaaacaagaaacaggaaataggaaacaggaaacaaacaccgcgcctgccactagaaacattccataaaattcagacggccatctacattcttgatagagtctgccagattcacctcactctcttgcacgtttccctggccatcatcgagttgcgcgtgcagaatgggattgttttcggggccctctagcttgaaatcaacgtcgcgtgcacattttgagaagtcgtgagcgccccaagccaatcgtcctattgattatatattagtattgaattagatatagataatagtatggtatggtctttcggacataagggaaacaccatgaacagaacgaacagagtttggatgatccttacccttatttaccccaatgaatccatccagatctagctctgaatatgtcgtttccccgcccggtttctggcagtaagcagtgaggatgtgcttatccttgacattgatgccatttgatgatttgtggaagcccatgctggaatggaatatagtaatagcgggtacaggttgataaatgcgacaggctgtggtatagtttgaaagtgaggctcattatatgcaggaatggcaggtatcagattattgcctctaatgacatcgatatggtgtcgatcctactgtggccatttggaatggcgaatgcgggtggctctgccatcatggttttctcattatgataggtacccggggtaaggggttgatagtataacagcgtaccccatgtcagagatgccgaggaacgattccttgctgggctactgctgtgtctaaaatagagtggtctttacccaagtggaaggtcataatgatctcatgcacacctgctgtcaacctcgcgttcacttgtagctgtcgggcattagtttctgtccggcaagaaggagcacagagatggtacgatggtggcttgggaacagagttgacgctaaggactctatttggttgggattttatatctccaggcttcgttacttcaaggttaccaagactgggaatcaagattgtcgatcttcacgtggtatgtctcctaaggatggagttttgggtttatattttatatttttatctccacttttacagcgaagaatgtagaaatatatttagttaatgcatctatcaacatgtacaagtacattctatgatccatagcccattcctccgttagatcagtattgtagattgatctatgatctacaagaaatcccagtcccaccagtccaggatagcccaagtcttggcagaatagagttggttagcgtgctgcactcccacgggctgtgtttctgggttagcggaactggggacttcatgattcaggtgatttcgctttttctggttggggcacttggattccaaggatcgcactcttctgatatcacggggatcgcaatgttggcaattccacagagggagagggtaagcgaagaggaaaaaaaaaagatttaaatatcccctcccgtcaattccgaaatctgacgcaaaacggttagcctaaaaagagaccaaatccataaatcaataaagctgatcaaatcaaagaaacccactcgggacttttggcccccaagctataccaaggttggcctgatgttgcgacaagcgagactgatcgctgctgattggatctatcgcattctgtgttccttcacatctgcggagaaattagcgtcgcccgaacatttccggtggcccgcacagcgatcgccattggatcttccgaaagcctggaaaggaaggcagcgtattcggctctgcactgtcaaaccagtcaaacaggggagattgaggatgatgatctaatctctgtacgactaactatggtgccacgtgtgagctaaataatcctttggagtaatcatcggcatggctgcagtacatcgtgaaatatagggaccggccccgtccagatcggaaggggcacacaccgactttagacattgacgtctgatccccagaaaacgtggctctgcggtgttctaaatatgcatacattgaacctctaggtcgggactgagtagatatacttagatttcttagatgctgactcggctagaatgatgctgttccaagcgacattcctaccgttttggactcagcccaagccctggaatgaatacattccattccatatatgtaccaggttctctttttatgatcatcctgaatactcccgcggaaccatctcatgaagtctctctcatccctgcacgccagggactagaccatcgggctcccaagacctattgcccacttcgggcttattgacgtatgctgtacactttcaggctcgtcagacatggttcccctacgttccagcccagtggtaacttcaccggagacggagatagggtggttccggcctggggcaacgatcgcaataggtcaatcagtctagggtgtcaggataagggatgcgcaaaaagaaaaatcaagaaaaattgagatgtgcggtgatcccgagagactggtcttacacccccctggtcggggactaaacgtacacctgttggttccaatccccaggttcccagtgtagagtttgtttcttttttcttttcttttcattttcacacaaatacctatattgtataactgttgtacagaatttccttccggtccactttcggttgtgatcaccgaggtcggcgtttaatcccccatctgactcatagactccgacggagtacggagtagaaacggccgacttccgcctgtcagctaagcttgacactttagcgagactcgcactgcatggggaatggcgtctacgatagcgcaaggattgactcccctcttttcctaacggggttaacggtgtcccttgacagcgacccacaatccagggtccgccagatccaaagccttgcgaggcaaaggggtcgatcggtagtacggagtatatttccctgcattgtgtattctatcatttgaaatctggggtctggtgtcataggcccctgcgtatatcctcttggctgggactctgttctctggaacgcgggatgggatttataaaaagaaaagtcaaaaacagacggatagatgcatcagcttgaagtcacccgtggaccttttcttatttgtaatcatctatgacctgcaatgctggatatggtatctgtaatctgtagaactagaaccttagtaactatccaaggctagacggttcctaccaacagctagttcggctaaagaaattataaataaaatacaaataaataaataaaaagaatatccacatggattgtgcaatgtcgaacctatccctgctctcccatgcgcctagtggatagcctagcctatagggccgctatataagctacccatgtggcccacccgacatgactgagtgctatattagacggtccgttttagggttttcttttcttttcttttcttttcctgaggtatttcctattttattttctattttcacttacgtaggcatttttgattattctatttattccttctgggcttactgcccctccccccctgtacccagaggctcaaaatctcgatcgtcagaaatgaaaaagaactagaaataattaggaaaataattcgagaatccgaaatttaaatccgtcagatcatatctcttgcgtaccctggactaatacaatttcttcccttctcctctacttcccccatctcccctcttaatcttcactttaagatctccagggctcgtattctccacgtgcttaattcaacttatcccccaaacctcaaccgcccccaaagttatttttggagaccctgttggactcttcccttcctctataactacagggcagacgtgcccatcaactcgttcgctacaacaccacctgtggagtccttgactccagtcccggttctcccccaagcaacaaggccaaaatggtcggtccaggtggcggtccaccgcgcaagagccacaccaagtcccgtaacggctgcaaaacgtgcaagagaagacacatccgatgcgacgagacctttccgcaatggtatgtgctgcaatccccaccagaatctccctactaatcccatccagccgcaattgcacaaagcacaactgccgctgcgactaccaggatacggttgcctcgcaagctgggagtccccccgccccgcgtcagggtcctgacctcctcatgtcgccagagatcgaaacgcaaatagacaattggcatcgcactggcgtgcctccgtatccggagctcttgcagtgtccgcgagctgggtggtcgggcttgtcgcgcactgatttgcgcttgattcactatataattggggcttctattgacttgcatcgtcgagggctaagtgggtgcacggtgtgggcgcagaagatgccgaagtgagtgctctttagcttggttggtggtctttgctgacgggtgcattctatagtttcctcgctattgcgcttggcagcgagttcgtcatgagctcgatattgagcttctcggcgtttaatcttgcttttcttacgcgagacccggagaccaaacagctggctttcagtcgtagactcacagctcttcaaggattgcaaactgctctagggtctttctcgaaggaaaactgtgatgcaattcttgcggcttctgtccttctatcatggcaggcgacagaccagtgagtgttatatgtaatctcccttggatcccgactaacaccaggtcagtcaaaattgggcatctttgcaacacggcatctccagcgtcctggaatccatgcatccatattggaagcaagagtcagatattgcacagtcgatagaaacccaacgaagaatgagcacagatctttcaatgcctggggtctacaaagcccccgacgaagacatgatacatttggatcaaactatccaggccctacgaatgacacagaaacgcgtttcccacaaccccgagcactttgaacgcctaggagacctcatcaaattcacccagaaattccgcaatgatttccctaaccaaacaaccgcacaagtattcgaaagcgtccaacccatccgccgctggttcttctggctcccagcatccatgctcggacgcggcgaatcagacatcagcgccctcccaatcctcgcccaattctttgccgtcggcatctctctcgacggctgcttcccagagatgggcggcgcatacctaggcgccttactcgtcggtcccatagaagagatctaccgcataatcgctacccaccacgccgcagaccccttcaaccccgatctgcgtctacccctagaactcatggatctgccccgcggaatcgtcgcccgccatcgcagccgctgcaacctcccctggtccccccgctcatccgtcgacccttactctccgggcccacccagcccttttcaccataatctgcacgagtactcgctcgtcgcctcctcctcctcgcctgcttccgcctccacttcttacgccgcgtataccccacctttgcattcccctcctgccgtcactattgccaattctacctttcccgtccaagacggttatgcctccgcaacccccattccacattctctatacccgccctccccgcattctctgtacccgccctccccacagctcatcgatagccaggaccccaacctcggtctctcggatatgggtcatagcaacgcccatcatccttcgatccctcatccagcggcttacaccccaccgtatggcgacgggctgtgcgccagcttaccgcgcacagacggcacactcggtctcaatatggaggtctatccacagccacacccgtttgaaatgccgggcttggctgcgcccacttcactttggacctgattgtctgctgtgctgagtttatttatacggaaagaaaagaaaaaatatggaaattctggactaccactctgaacagagttggtcagtcagattctggctattgaataccagggaattcgaagatataatgtctctcatttttgaaaatatgaagtctacggaattatgttctacgggaattggacctgcagaacatgtgatttaccttggatcattatacgagtgtttcgtttcacgacctgactacctatattcggaccttgttttgttgagcatgagcgttaatgtgtgatcttgtctctgattttatcggtttggtttttatacccggttacaattgcaaactgagggaattgtcccaacctggtattttgattgatatatatatgtagggtattgatatatgtactccactatgggtactgggcctgggcctgggactgtcgttggctgttgaaagacgcgaactagtcttactcggagttctcaatctggatatcaccgcatgaaggagcgattgaagtacccaatcttgcaaatccgggattttcgagccgacagctcccaacagctgccttacccctctatgtggaagtcgtctattatctttggagtattctagtacaatcatcattctcactcagtttctttggtattcgccatgtcatcgccagaaccttcgcaggctttcggcttatcacaaggcttcactacgaaactcgccatttccagtctcattctcttagtacagcgatctcccagcgcgggaaaaaagaaaatgacaatatctgacgccgattaggtcctctactggacctcaattgcattctacaatgtatatttccacccactagccaagattcccggtccgttgctcggacgcgcacctctagtatgtctcacctagtctatcctgcccgaattggacaataactgatccccaaaccagctatggcgagtcaaacactcaatgggaggaagattccacgtcgccatcgacaaagcacacaaaaaatacggtatacctaacccgagccctcacacaaaaaaaaaagaaacagcactaacaaatcccatcatcaggcgacatagtccgcgtctcacccaacgaactctccttcgcctcagccgaatcctggaaatccatctacggccacccggtcgggggaacaatcacaatggtgaaaagcgagttctacgagatgttcggatcaggtttcgactcgctgtgtattgcctcagagcggaaccgcgcgttcattcccgtatgcggaaatctctgacgccggctttctcgacgaaggctcttgtggagcaggagtctattgtgcagagttgtatagatgggtttattgagaaggtaggggaacgggggacgcgagaggaggggttggatttgagcaagtgggttgagatgttggctcttgatatcgttggtgagatggcttttggggagagttttcattgtattgagaatggtaggtcttgggtgattactgtatgagatgagatgttcaatggctaacgagttcaaggaaaacctcatcattggagtgagatggtgacatctcatgtctttatcgccaccctggtcgataatcttcgccgttatccgctctttaactatatcggggttttcattctccctaaactgacgttttcggtacggaatcggcattcgcagttcagtcgtgacaaagtcgcgcggtgagtccacattctctgttgagtgctcaagcacataggcttatttgaatacaggagacttgagagtcagtcatctcgaaaagacttcctcaccaatctcgtcgacaaggtgaagaacggcgaggttgggaaggaagaaatgactgcacatgcctctactctaatgttagcagagttctttcccttaccgtccatgaacctaattatattacagcatcgccggaggagagtcagtagcgaccttcctagccgctactacctattacatccttaaaagcccatccgtgcatgcggagctgtgcaaggaaacctgcgccagcttcgacaatctatctgatatcaacgccacggctgcgcagcagctaccgtacctccaagccgtcatctcagagagtctacgcatctacccgtctgcatcccagggctttccgcgtctgagtcccggggcggaaatcggtggcgtgtatattccccgtggggtaagctaaataagtttattctgtcactgctggcccaaggataggagttatatgtatgctaatattcgatctcctcagacggaagtctacaccagcgcctggacagtcacccacgatccacgatacttccacgacccttatgtcttcaagccctcacgctggctcgatcccgcttgcactgatcttaaagaagctagccagccgttttcccttggtccgcgtggctgtctaggtcagaagtaagtttctactctattggatacctttcttcacttaagtattttgatggtaaatgtttactaatcgacattgcagttttgcatacgtggaaatgtgtagtattcttgctaaattgttttatacctttgatctggaattgctggactccggactagattgggaaaaggagagtaggatgcacgttatgtggtggaagccgtcgcttcctgtaaggttccgagctagggaaaaggtttcaaccaaggaaatgtgagcagaacgatagctctagtgatatttgtgcctgcagacaaacagcctccagagccagatagccacacaattccataggaatctacagattattcgattacttctgactggtataacgctgcattcgcattctccaagagaggcacagcaactctcacactatatatatgtctgtgacattgaacacaaggaactaaaattgatataactactgctatatgatctagcataactatcctacaaccttaaatagtatgttagtgcatcgtcttggcgcatcctttcaaactcaccctaatcctaatatggactggggatctgttgcagatcataagtttacccctgaatcccgatctgagattgtgcgactctgttacacccgccgatgcacactaagcatgtgatcggttacaagattcagagtgggctctattagggttcgggaagcgggaagcacggttagtagatttgggtttgatactgctccaccgagagatttgtagcacagggcagaggtagctgtgttacaattcctaccatccttgcaagcttctgagatatgatatgacggaataaactagttagttaggtaacgaactagtgagttatgatgagttatgagtcattatgagtggccagtgaagatcgcctgtgattggtcagacaagtatagtaggagaagtatacttcatgttcactatcctcttggagtaacttctgaagcactaaatagtgtcactgtgacaagcctgtgttttgagggctataccatcggaatgtcagaccaaggcgcagacctgagcgcgggctcttcctcccctgtgacgcctagtctgcagttaaaagaacccgagaaagagattctccagcgccaaatacacactccaaagtgccatatgagtcgcctaggccttttatatacatgtgcaacaacctatgaactacttgtcctggccatcagctcaattgcagcgataattggatagatgggataaatcttctatttgcagcttgttacgaccccgagggtcacttgcacaactggcccgtatgggccgacgtacttgctaagtaagcgccaggggtatatacacaccgcgcacatgagatttagaaccttagcgattagtctactgaattgtataacccacgctagggacctccactctaattcaaacctccatttttaggatacactggtagctagtcctaacattctaatcgcttcatttttacgaattagaccactggaacccataagatacctcgaaatacccgtagcagaagccgggtgttatagggagatatacccctacctgccggttaagaaaaccaaacgtaggatttacaaacccctactgagataggggccatacctgccaaaagagccgctcctataaaagagggggctgcctaaccgataaaattggcaccagctttaagctgggatcttctgggctcgacaatttccctcaaagctcaccacgaatgtagagagtaaaattagataactagataaaggacttatattacttatataaggaagctagatatattataagaatttacctaaaagctaagtagctttagaagaataacttaaaggagctaaaaaaatagataaccctatactataggctataatagtactaggaataacccttagagagggttagtagaagggctaaagtatattagtatataatatacttatcttagatatttataagggtgccctaataggggttactagaattctaattaatagtagggctacctaaacctttattagctaaagataggtaaaggagaatctagaagatataaaaggaataccctacttagtaaaggcgattaataggtataaaatctacttatatagtagctgagagattactctttagcttatagatagtattagaagatatagtattataaagatatactataaggctatcgatatattaggatataatatagtcttagggatagactggctctatacagtaaatctagatatcgattagaatactagctattagttatactataagggtaccctattagaaatagagatagtctccctagaagagtttaagaaggaactatatctatatagtatcttttatatactttatattagactactagatctattagaagaaggtaaacggttaggagctatatagatagataacctcttactataagtatatagagactttgtagatatctttaataaggctctagcttcgatcctactagaatatactatatataattatactatcgatttagagctagggaaagtacccccgtttaggtcgctatacttactattaaacgtagagttagaagtcctatatacctatattaataagaaccttaagaggggctagatctaatatttaaagagtcctataggggtacctattctttttatactaaagaaggatagtaaacttcggctatatatagacttctatagattaaatataattactattaagaaccactactccttacctttaattagcgaatctctattaagacttactagtataaaggtctatattaagctagaccttagagatata

SEQ ID NO: 66 - DNA, 168620 bp, Penicillium roqueforti
  misc_feature (5048)..(5222): n is a, c, g, or t
  misc_feature (67666)..(67900): n is a, c, g, or t
  misc_feature (102399)..(102725): n is a, c, g, or t
  misc_feature (131702)..(131799): n is a, c, g, or t
  misc_feature (140180)..(140407): n is a, c, g, or t
  misc_feature (161892)..(166602): n is a, c, g, or t
cacaaaatacactcgccttaccaccgtttttccgtcagaaactttcctattgtctccgatcgccagtcttgttacatcagcagatggttgaaaattcttcccatatttgtacggaccaaatggcttccgtaaaaaggtattacctcctattatccaaggttgtatttttcatcactggcggttgtgtaaaagttgtcattgagtaggagtagtgatatagtctaaacatatatacaagaatcaaacgtctaccgtttgtaaagagagataagggattatagcgaacaaagagtatcaacttgaaataaaacaacgctatctatcactctgtcatctatcagtctatacatcaacttatcgctctggtaaattcaaccggaggtttaataaactgcatgaggccgctagtcctttcgcgatgtggcatagagaggaccagaaagtaataactcaaagtatggaggaactattaacggaatgtaaaagcattatggtactcaccatggtcaacagacgttcactatcggtcgtgtagctagctcaccgactatctccattaacacatatttgttgtaccataacactagaatatctttctcgcctactcaacatcctttgactctcaaaaatatcgctgctattcggatttcaggtagatttgatgaaatagagctcttatcagtgtcaaagtcgagaattttgagtgctgcttggtgatggtgctgttgtagcatataatcggtgtcatgtgcctcatacagagaccccgagggattttagggctcggcataggctacgtattccttttcacttatttctggcgagaaccttgcctggagttttatggttgcacaattttatggtcgtgataccaggtactagtaactagtaacccgggtgggtctttatcaaatgacagctggcgcgaaatcctggtcgtatctagggctcttctgttcaagggtagcagcataagagttgtgatcaacaagtgggggactgcaggagacgtgtgaaatattgtataatgatgtagccgtacgaccatgacgaagacttacgaaatgtctaaggaaatccgcaccatatattggcccgttaacatctttcaagttcggaattggaaatgcaattcacgctactggaaagcagagctgctcttgccagaacgaccagatcatcgcatgggcggtgcttccccgccaagaggggctgctactggaaattagcgcaatacgatatcgtgttagggaacttacatttctcagagacttgattgaacctgccgtctcggtagcggacaaaaatcccacagcagcggagtcgattggccatcgatccaaatcattcacgccaataatgcctttatctttgtcatatttctgcatgagccgcatcgtaataaacggaagggccgcaacatatgcggcttcggattgatctggtgtacaatctacacaaaagtccaaacacgctgtgaaatgtgagacagataacgcaaggatgggctaccaacaaacctatcttcaggatcccgtcaataccaagtaatatatcgtcacaggccagatattgatgtgcaaggccagataaagccaaatagcgggcaccgtcgagaatctaaaatgtcaggacaactctatcggacagccatgacggacaaacctggcatataatagatcccaattctgcctcgctgggatacacagatggaacggcaacaacatgcgcgagagtcagcggcaagtcgtcaaccaagaagaacgcgagatcatcgtgcatatagcattcatataaggagagaacgttcgtgtgttcgagacgtccgaatctatgaattaatctgcgagcagtttcttgcggatatgtccggattgctaccatgcgagatggacgggtgcggcgtgtggcgattgtgactttaccagcgatctgataggtaatgacttcccgataggtatcccacggcgactcctgtcttacaatcaagacagttgcaatgttttcgataccacacaagcggggcagacaaaggctcttaggaggccccgtgacaaccttcgatctactgcggcggcgaagtctgcttggcttcgtggtggtcgccatccggctttcgtaggtggtggagtttggcatcgagatagggggctgaaattgtgctttgatagtgccaaggtcacatatcatgttttctttgaatttgttggttgccatgataagataattatgatcgcatgaactttgagagaaagggatattccatcgcttttatatgcgaagtgttacggatgggactttcatcaatgataggagaccgtagcttcgcccgactatcatatgatgaggcttccatgccacggttgtcacctccagacagtcatcggcatatgtagcttgttatgactgatatctcagcctacataaaaatgagacccgagctaattgaagcgtaacatattggcctcccaactgcctcaggatattgttgctagtagcagctcattttgctatgagaacgttgttctcgaagagaatctagatttcatatgactggcagtgggaaggttaaaagaaaatgggagctactcgcttctttcccggtttttacatacacacacacacacaattcattaacgcccggcggctgagccgaaagggcaactatcgctaaactactatacatgtcatagtatatacaattctgtgactcattggagcccatacacaagaccttggcgtatttgtcattctcagcatgcagtgtcgcagcggatgctcgtgggttagtaagttggttagtagactggcttgaaggcgcttctccaagtgttcaacatcctatcttcggcagttgaagcgcgtccaccgtgaatagcacgaggtggttggtgggttagattagaatgaaagaggggtgatttatgttcgtcggcggggttaagtggcctcgaggcggcctgtggctatggcgaatcgtattgaggcccgtactgcctctaagtttggcgtccacttttgatcgtcggaaggcgacttccctcccaggtaaaagggcagatttcctcggtgagtgtcggtacattgtagcatatccgtccggtgtgtggtccacttccgacatcgaaagaggaagtgctccacagtttccttagcttgtccgcacgcacactgatccgtgtcggccgcgttgattcgatagaggtatccattcagtctcgccatgcccgtccggagttgggctagcacggtcgcttccttccatgacaagggatcatacagctgtcgcgtgtgttttcctgggagtgctgcatctactcgtttggcgtgctttccgacgtccgctggcagggtatttctggggactgcttgagaccgtgcgagattcagcgtggttgattttatcctcggggcgcgttcttgcaagagggcatcttcttgtgtcgcggctctagcctgttctttagccagacctagcagcttgttgtcttcactggcagaaacccagcggacttgaacatggtttccgtttctctgcaaccttttaatcaacttgtatatccgacacacgaactcctggccagattgttgtcgagggttcctgagtgtgagaaccgccgctttgttgcttgtgagcagtgcgatcgtgtagtctttcagtcccgtcgccgtgctcaatacatgtgccatggctgccagttccgcagagaatggattctgctctgcccttacagccaaggtgatggatagcgctttgtgtttaagcttccgattccgaggtggtcgcttctcgatggccactccaaaacccaccagctcgtttcgtgcagagctgctaaccgcgacctgcatgcacccgcccgcttcggccagggactcatgctgctcatcaatgtcggtttgtacgcgttccgcccacggggatagcgtgaaggggttgatcgtttctaatgtctccatgtcgatgtgcttgagcgtatcggctacgtgatacagtggtgagcggtggtatcttctgaactttctgatctgatctgtacaccggcgaagaggattggtttccggcaaggtgtggatgtctgtccacattttcacggctcgtttccaaaatcgacgttgtgcagtagccatgtgagcctccgcctctgcgacactagtcgcgactgtgagaaatgtccccacaatggcttgcgcgcctactctttggactcggttgatcggccccatggctttatccttgcacgcgtgcatccagacattggaggcgtagtccactactggtgctactgtcgatgcgaatagctgtcgcgcggttgctggggagaggcctcggagtcgccgaagctccatcgctgcttcgagacccttggacgctgctctcgcgatatgctccttgtacttaagtctcgtgtccatcaagacacccaggatcttaacgtggtctttgggtaccaccgtctgccccttgatggtgaatggctcatggtccaatttacgcatcttgggagcaaagtgtatgatagccgtcttgtcagcctcaaatgtcgctccgcttctcttttcccagttgagtgcctcgttgatgatggcttcaattccttcccggttactctgcgcagtcggaccggtcacccacgcggtaaaatcatccacgaaagcgactgctcctccctggctgtcgatctgtctttgcacgaggtctgcattgaaaaacagaaatagaatcggagacaggggcgagccctgcggcagcccagcttgtggcaagctttgagtctcagataactgcccgttgatcaggatatttgccgttcgttccgagcagaaggccccaacccaacgaagcaagacctccggtatgcctcgggctttcatcctctggatcagtcgttctttgcatactccgttgtaggctcccttgacatcgaagctaatcaagctcagcactcgtcggccgcgccacgccgcatagatctgctcctgcaggaacaccagtgcttgctctgcggaccgctgctttcgagccccaaagtggctcccccggcggnnnnnnnnnnnnnnnnnnnnnnnnnnnnnnnnnnnnnnnnnnnnnnnnnnnnnnnnnnnnnnnnnnnnnnnnnnnnnnnnnnnnnnnnnnnnnnnnnnnnnnnnnnnnnnnnnnnnnnnnnnnnnnnnnnnnnnnnnnnnnnnnnnnnnnnnnnnnnnnnnnnnnnnnnnnnnnncgcgcccaaagggggctcgtcgggagcagtccatgcgtctccaccgcgtgcgagatcctctctgcgatcaccgattcgagtatctttccgagtgtcgcaaggagtgagataggtctccatgcctttgcaatggtgtagtcatctttattcggcttcttgagcggtatgatcttggcctgtctccactgtcttggcagtgtgccctcttgcagcgaggcttgaaagaggtcgaggaccctgtgcttgactgagggccacgtcatcttccaaacgatcgccggtaggccgtcttcaccaggtgccttccacgacttggccgctgacagttgccgctctatctcctccatagtgacggctggcatgtccacaggcgctctttgtggtctcactccttcctcgtcgatgttctctggcaaaggcgggaaaaacttggatatcaattcctccgcttgctccttgtgatcgttcgtagtggttccatcggctctgaggagctgcggaatcttcccgaacgcggcattgtctcccgacttgaggtacttggcggctttccagatgttgtcgttgtctgcgagaaactcgttccagtgcttcttcttttgtttgcgaatggcatcgtggtattgtttggccgcatcctgggccatcgtttcgagccgggggacttttcgccccgcccgtcgctcggagcgagcacggtttctccagtgcgtatatatatgacggagttgagtgaggtcagctgtccaccatcgcttcgcatgtggtgatggtttcgccctcggggttaaagcgtgtaccgcttcggacactgccaacatgagtcgatccgttttctgctgtaccgtgccctccgacggaaggatggctagagcgttctgaatcctggcgttaatctccttccatggtgcattcttcagtaaaagtcgctcttggtgctttgggcccgaccactgggcgtcgaacacggactcaatggcgcagtgatcagagccgtggtctgtctcgagtaaagcacattttgtcatggagtccgtcagattttctgaagctaggacgagatcgatggtagactcgcagtctccactttgtccgccgccgtgccatgtcttggtgccgcgtttaagcaagctactgagcgcaaactcattcataaggtcaatgatcggatccgcttccccttgtcttcccagcgacacctcgtctccaccccagagttgatcgtgtcggttgaagtcccctaccatcagaatctccaccacggcgcctgtctctcgtcgtacttttgtgatcgcatcgtgtaaatgattgcacgcatcgtccaaggctgagatattgcctccttcaacgtaaaccgatgccataaagatcagtcgctcggggagcctgaccatcgctgctgtgatgtctggagactccacagggacttgctccgcttcgacttctttgttgacccagagcatgctccgaatcgcccatctcccctccctccaggtagagggcaccatctttgtccacttgtgatgccccattggagtggtcaagagccggccttgaatcctcctcgcttggggttcctggatcgctagcgccaccgcgttttgagtgtcttcgtcattcattaaactctcgtgcactgcaccctgcttcctcacgttcagctgaattattcgaagagaattattcatgacgtgatggatagagcttccggcagttcttgctgtacgattcgtgaggccctccgcacggtacacactttggaaccggttggatacagtcgctgtggcgatggccctctgtagcgcatttcgcgcatttctgggcgttcttgcactggaatgccttatggcctatctcttggcagttgtaacattgtgtcggtcgcggtcggtgttcgaagacactagtcacaccagattctccccccgcgtggaaaaatccgtcggccaagagccttcgcgcgtcgatgcgtttggtcaggtaaaccaccattgaaccgtaggccttctcgctctcttttctgctcagccatgaaatcttggctacgttggtctcattctcctcactaaacgctgctgcagcctcggttcggacctcaccgctctcgtctagcacggaggtcttgttgacgctatcgactttgatcgggtagagctcgtcacggaggacccgagctcccgccccgattttctgttctgcaacctttttgaccagctgctgttcatcctcatcccggcaggcgatcctgatccggttggcgtttttcgggtcaacggtaacagcgcgacagcgccagtgcgcgtggccctctgttaactgtatctctgcctcaaccgctgctctgaccgagcctgcggaggtcgattttgtccctttttctgccatcttcgaggtatctatcgtgcaaaatagcgtgtccgtaaaggtggtgggtgtcgtgttcagcgttaaaagggaccgtatgttgcttgggtaactggacggcggagtgcgcgcgacatctgcgtaggaaggagagcctgcaacagcgggaacactgatttcctcgcgtaaggactggatttcgcgcaggatcgcatcgtggttgttctgagagcacgtctcagagtggcattgcggtgtcgtgtttctattcgtcagggactgtagctcgtgtcggacctccgcgagggcggtaccgaactgttctctggttctctgaatttcttccttgtgtatttcgtcacggagtctgatctctcgcctgagtttggcgatctctctcaccaaaccgccgacgtcgagctcttcgcgctcggtcgcggcgtcgtccgaagttacctcgtcacgccggtctcctagctcaattctctccttttgctgggaacgcgtctttcgtcgatcagtgtcaatttcctgctcacgagcgtagttgttcggtggtcgagtggtgcgtttcggtctcgccagtcgcggtggcgaatcttcgcgttcgtcacagtcgggcggttcaggggttcgcatcgcggcccgtcccgccattggtcacagtaactcactagacgcgctcgaaatcctgatgaaagtaccgagagacaagctacagtacttcccgaaactgatacgtactacagtaccccccagaggtacaggatgggtttttacatacagggaggatcgaaatcagtttcaccagatgcacacagagattatttctcgaaccctgtcatgaaacacgctatacccgttacagctactatactcttgaacccctcacttggcagtattccagtacaggcgtaaataactgcttaaaaatagcttctgtattagacttgtaaggtcttcggggtttctagaactttggaatagcaaacttcccaaaaaaagattcccatctcgtccacatactggccgggcttttcgaggaggcgatcgcatagcgattctatcatcggaggtgttacgttcggtcgtcgacctactcgagctggggtgctctgacatttccgaatcggcgaaggttattactgattttgataattgaacgcttactacattcaacagcttgagctatttgcgaggtagtgagtgatttgcttaatattatacgctatatcatttcgagcttcgagagggagagtcttggcgccatgttggggaaatttagataactagtgaagcctggaaatttaatagtcagcaactccatcttctcacccttgctcacccctctgctcagtgagcaagggaaatgattcctggtgaaatgtctgggaaaggccaggtaataggaaatgcacgtgacctagtgaacttgtaggagcctggcagcacatctcaaagctgcggacctcagaaaagatgattaaacgaaatggcgcatcctccttcggttgatccagtacttctcagaatgtgcactttaattgctgaatcagtgacctccttgagcgatgagggacatatattttatccagaaaatgctggctgattatacgctcgatctgacttttgagatcgggtcgtcctgttcctgggaacgccattacccgccccaacgtggagggagatcgttgcaaaaccgggttgaaagcggtgtggcgagtagaaagcacacttaattcatcttgctgagcacgctagagtcacatgatgacaaggctgagaaaattcccctctttcagttcgttggacacggggcccactgagattctcgtcatgaaccacattacacaaaagctactactcaacgtcttctgctagacgagagagagagagtgtttgaaacattgcgcactatctcgtacgtccgggcattctggttagtcgagcttaccacccaccatggctgagagttccaaatctcagccagagcaatcagtgttaggacagaacaaagctggtaccgacacaccaccatgtcgaaagcgacttcaacatagtgcatatactattggatgggtgtgcgcccttgtaaaggagcaaaccgcagccagagctatgttagatgaagagcacgaacctctcccgatcccttcaaatgatcttaacacatatactcttggctctatacgtggccacaacatcgtcatagcctgcctgcccaatatggaagccaactctgccgcaaccgttgcgacctctatgataaacacttttcttacaatccggttcgggcttatggtagggattggcagcggaattccgtcaaaggtcaatctgggtgatgtggtggtcagccaaccggttgctgactattccggggtagtacaatacgatatggggaggttgggaaggggtgggcagtttgtccacacgggcttgctgaacagacctccaaacgcgctgctcaaagcgttgaaccggctgaaatctgatcatgagatttatggatcacaaatcaatgagtatctagatgatgtggaacggaaatacccgaaactggctccaaaatataccaggtgtgacgagaatggaaaatcatctgagaacgaaaaggagaaaaggaccgaaagagaagtcagggtgcattacggcctgatcgcatccgggaacaaagtggttaaggatgcgcaatcccgagactccctcgataaagcattcggcgggcacttgctatgcgtggagatggaggcagctgggctcatgaatgacttcccgtgtgttgttatacgagggatttgtgactatgcggacctgggaaaagaaaaaggttggcaagaatacgctgcaaccgtggctgctgcgtacgcaaaggaactgttaggatgtctgcatcccagtcttgttgatgccgaggatccaggaaaggctacactagaaaatggtaagtatatacctatccaaatagatcatgtgcaggtgtctaaagctggagtgccaacaaatacccaagacatatgaaacgaatttggaaatatattctgactgcaaatagtgagacaacagatcgaaagggtacagcagacagttatggactctggggactccgactcatccagtgacaacgactcactgttttctgctcctgtctctgtacctagcaccagatcgtttgactcgggaaaaggtgaaatgaattcgttgttgattgagcagtttgcacacttgctgaatgaagacggagatatgctttcgctacttttgatcggcttatcaagagaaccgatcggatttgagaggatgcgaaacaattttcggagactgctgaaacacttcgcgaatgacctcaaggcggatatccttagcgaatcgcaccgagacctagtgagatttgtaagctcatattcagttatgatcactcgtgagctctttgccatggtgtctgtcgacgagcagcgaaagctcaatccttacgaacgcctagcccacgagaggaaagtggaatcctatcttcaaagtctacaggacgccgctcttcagactagtgaagtaatcgaaggacttgatcctgatgatgaggacagtgacgaaggatccgtagcagagggagccaacgaggatgagccgtatgatggatctttgcaaaacctggatcaaatgaagcactttattcgggaaagcgctgcctaccaaattcttcgtcgtcggcttgaagagtttgttcaaccctcactaagctcacagtttcggaatttggtgatcaagtggtcaaaaccagaaaataagaaccatggcgatgttgctcggtataaactgcggaaccttgtcacagatttacagcacgtgaatccctctgagattcgattcgagcatgacgagagcagttctcgattttctatgttcatcagccaatatcagcatttaattgagcgctggaccggagagtcttgggactggtggccgttacctcgctatccgagaccactggccgaatcagagacacggttacggtggaagtgtgtgagtcatcaaattatagacagccctattcaatatagatacagccctaattcaccaaccaggtgtgtggcaaagagcgatgggcagagatgccaaacacccttgtcaaacgcttccagtctataatcagaaggcttcccgttgacagcttggtaacccaaattacgtcgcctcctccaacacacacttctaatccgaacccttgcaatattctaaacagcaatctaatttctaaccaaacttcccatcaagatcatatagtcgagcagccggacggttcaccctccaatccttcacttcgtcctcgaccctcgggactcaaggttaatatcgcggacttgagcatcactcggcaacgcgtcctctttctcgcaaagcaaggcggagattatagactagcacaaatttgcgttagcaatatgacctgtcataccttcttcagcacaatgaaaaaggagtattttcgcctgagaggtgtcttgcgaagctggttcagcgtttggagatactctcattgcgacttttacaaagtaagtactattgcctgtgatcgtaaggtattgttaaaaataaaaatcacagttcgagaagttcgatgaccatgagtttacggtcaggatcaaagattcattccctgaccatgcgaacaccgattacgagtatcaaccaagaccgatggacaacattccgcctatctcagagcacgaattcacgaaacgtttctacgcgtgtcacaaaccaagaccactacttcacctgcaccacgaatgtaggaaaccgggggcacattcctctgaaatcttgcagttcctcccaaagaaaagaactgaactagaagaagcaggcaacaagcgcgaagacttctgggggatttatgcgcgcgaaaaaatcagcttacgttggatcattctatacaattttggctgcgtttcacctttgctagcgttcttcctagcgtggattgtaccccatgggcttggcacagacttacaaaacccatctataccgctttccatgatgattgccatgctttctctgttttggagcttgtatcttagcagtctgcaattcggaaggtcgcattaatttgaatattttgtattcgatgagatattgcctagctcactcagaaagtccccgctctgagcaaagacggccttgcctgaacgtccatttaccgaccactcattagaaaattttgaaatttagagggaaaatccaccacatctgcggcaaccatatgagcatagcctcgtatattcttgaggccgacgagcaccgatcttgatcctgcggattataaccgatttttcaggcaattcctgcttatgccgtaatttcctagaataaacctgtatatatattgatttagtaccattcaagcgcagagcttagctcttaatcatggctatcctcacttaaaagagatcaaataaaacaatgacggaagtggtctactgtgcgagatatctttaggaatgagaggtgtagacttccgcaaaacccaactttcgacccagtttcgacccatctttattcgtaaatatacatacactcaatttaaaagcccgagacacgaataatacaatgtttcaatacaagtcagcatttgaaacgaggctaagcaagattaagattagcgtgtttaaaaggagggtttgagaaagaatccttgtgagcagatggtgaaactaatttcgatccatcctgtacattagaatgagtctagggtttctgcagtctgctttggtgtgtgtagctttcaggtttatatgtcagatcatagggtggcgcatgttcctgcttcctttatcttgagttatcaattgcgtgtgagctctctcgaaggagaaaattttccccatctcggtcggtttgcaagctccgaatttttgaaatgaatgtcttcacctcatcccgggcccttgagcgaagcttaaccacggtgtagagtagtgcctgacgtaatgccgacgactcgatgctgtaagatttgcgcctgcggtcactgctgggatcatatatgcattggcaaagttttgccttacagttcgcgcatggcagcgcaccagaacactgcatcatattagcactggaaggaggaaattcattagcttctaaccttggtccttttctggcgacaatttgtacaagcaagagagacattctgtcgctttccacacgatgaaggtgatgtctgtagttgggagagagaggcctgcaccatcgggcggagcggccgtagggcattttggcctgtcatactaggctaggaactgagggccaaatacgtcagaaaatattattcagtgcatatgctatcgtaaggaggtgggtgatgcgctggattaaatagccaattcgcagtgcccgttctctttgtttacgagatgaaaaaaacacattagcagctccgttaacacaaaggccgaaagctcacggtcattattgagaccagtcccatgcacattcccgagctcggctgtagcgattgaaatgtttatcaaacaaagaaacacggcggtactgattacattgagccctgcccccggcttggcacagatgcatgctttgattggacaacgcctggcagtaactgaatcacctcggtctattccaaagatatcacaccatcggtttgtcgtacagaaaatcatccatttcccttttggacttctgtgttacgttttacgacgtccgatgcaacgatgagaccgtatggctgctataacaatcagagttccgaagctgttgtccaggctagatataaacgaaattcctttgcaaagattagccagctattatgataatgaaggttacaaattaggtgtaactcaccattggaacttacgctatccaatctacactgatggactgcaatattccacctggcagtccttgcacaagtcgctactgtgggactttactccaactttgtgtgtagggatgacctagctggatttgagtccatttcctgatacaatgggccactcgatctgcatgcccctcattcaggataaggcaattgctccgacgcaggtgtatatcgctgatggtactgttacactctcgcatcatactgtgctgaatggtacaatgttataatgaatgcataagttgtgctggaccaaccgccagactcgcacaccgggtacgggatacaagaaacctattctgttgatattatattcgttcgtatagtcgcgagcttcgtcaggcttgtgaattgaaaagaagatcttatggtctccaaagcaagcacgacgatggagagaacagtacatcaaccaacgtttatgcggcttgcgccatattatgagctaggactgataacatgcaaggacgtgtggggcaatgtatatagcagttacgatttccactgcaacgatggttctcctttcctggggcacccaggcagcgacttcccgagaattacctaatgtgtatttaggtttctaagggtttgggatgaggcgtatacagccgccggcgagactttgttggttttagcggcgggtcgtcaccatttgacggctgttgatccatacattgcttgactttcgagatctcagcatctagcgacaagactttctagtttatcttaactgtttccaatcgatgatagatatggcctcggctcagccataagaattcgacccctcccgacctccacctctattgagttgctactttgcaatttcagtgatcttcctctaacgatatcttcctttacatagagcaattttctatatctaagaaacgggccaggactaccctcattagacaatccctcaccctcttcttgcaatttccgagattcctgacaggtgatgtctaacgggataatcccagtcagcaagtacgctagtaagtcgttcgcgagaagattccaatgcctgctcaaaaaagtgcagttgagattgctgcttgtcgtggagaatctgaaggctgtctctctcatgtttcaggtgcacaccagcctccttcaatatctgattgttttgctctagcttctctccatcgaagtgcttatacacgcacgactcccacacgcgtcgatagagcccaacaagtcgagctgctggaaaggtgaagttcgaattgtcacgttcgaggtctgctagcaccttcaatacgggttgaagaggttcggtcgccaagatacgtcttgtttctgcttcctgctgcgaaggggagagctgcaacagttagagatagcattccaagccactcgtgtcacgcactgatagatagacatgatcagaagcttcctgtgaattgcctttgtcattgagggttggcaattcactgatctgctgatctccctccttttcctggcttagcgagctgtttggggtatccattttgccctcgagacaaagcaaaggggctggacagtaccatttctctcaatccctggtgtctcttatagagtatgcagacggagtgactacgtgctgagttttacaatcaccacaatagtcaatcaacacagctggactttcactagaatgtattttatttttcaacaagctgtttacagtccatgcgaggattatgatattgatcaacgagttagtagtggtaatctgacgaaacctcatggccttgaaatccagattcatggactttatggactttggccaatttggtcagctatcaacggttgttaaacgccagtagagctatacgttgatcatatcacaatgggtcttttataggtatcattcaacgtctttatttactgtttgattaatcagtcaaaaaagaaatgataagtatacagatatcttcactgctgacatgggatgccattggagctagaagtgtttcactggttcattgatcaagaccatgatattgaaacccgacccttcttccccattcgttaaaagtacttgaaacccatccagcagataaaacatcatggaaataatagtgctactgtataaagatacgaacaactaaatttgaatgatgattatacgtttaagatactaagttgatgcacggctgagtttaacgtggttcgagcaagggcgggcacctgtaagcgacggtgacctaacgtgccgtaggtaaacggacaaatccacagctcaatacaaccaatagaaaaccgcggccgggaagactagcctgtgtctcctagtaaacaaatcggaggccggtttggtgattcgaagtgatagttgattgaacatcatggctgattgaatagccataacaccgcaaggcctcattttagagcgctataacgggttaataccagtcaacgttccttacaggaaccgactaagcatcactatccctcagcataacccttacttggctctttcgctaggcataaaacttggcatcaaaaatggcatcatgacagtcacaacaaatagtggctataagaataagatatgaatttcaacagaccctacatagaaaaggcaatgtgcccttaagagctctctaccaagcaaagcagtgaagtaataaggcaagccgagaagttctggatacgtcctctgccccgctctgcaatttattcacttgactacgccaaagtcaagcaggcttcgcatctgaattacttaataagttctcccttttaatccagagctgggatttccacttgactgacattcatggaatacagtgaggacagcatgttcgacagtgaccatgagagaagtgattcgtagtcgatccactgtaccaccaatgtcagccgatcaaagagatatgccttgccttggctggttagtgtccatgtaacctgtcgaagagccaccgttatttccctctctagatacgtccctaagggaaaagcgcgaatcatcatgttacgggaaaataaacctcagcccgatctatctgaaattctactgatcctagaggcgatgtgatttttcctggtccacgcggattcaacgacaatatacgagcgcaaaaaccacgaggctatttcccgtatcttcgtccctggtttatggcaggcatatacaacgcgcgctctattgcgtcttccgtcctcactctcaccgccctcacacaatgaacggcggagctgaacctcagaccgtccgcatcgcaaaacattcatccaccataggacaatttaactgtcacaactgggctggccacacttctactaagtcggtcaatcggccggtcacctagcctgcagatttcaagggacagccggagtttgcgatgagcttgtatacgatatggcacgaatgatgactactttgagatcttttcaaaagctatactaactcgtctactaggatcaatacttactgactaggatcctataacaaaagaacaccctcattattttgtcctcgagtcgaatgcgaagcgaacaaatgtcttgtctgctagagattccctataccaatacgatcgcggcccgcttcccatgctggaccgaatcgctgccgaattgatcgacggtcgagggactgcgaacctgggaccgcaacccttccagtcgatcctttgcctggttgtcattgtacggagggactggcttgctgcgcccaaccacctgcactgggaccggcgggggactgccgacctgcgattggagcttctctgattcgggactggattcctgctcactggatatatcgggtttggtatggtcatgccgtgccatatcgacatgccatcgatcgccgcggtctgcgtggcctgggaactgcttctctggtatcgtgcatcgactcatcactgaattcctccgtgctgggctcgctgctcgtgttagtggctcccatgtccgcgacaccgtcaccggacggactgcccatttcctcttcactggcctgccaattgggctgacacccatcacacatctgttcagccttcccatgatcaccgcaatggcttcgccggtaaccgtaccatctaaatacccatccaatatgtatcttcgacaccgcggatgctccgcctccatatactgctggatgcgtcgtaactcatcctcgcccgtatcttgcgtgatatattccggtgcttcggtatccgcgggctggatgatcatcgccttgctgctttgcccatcacggcccggacgaccactctcctgcgcgtaatctatcaacgtgcgcggctgcctaacatgaatgatacaacggatgtcgggaatatccacacccatacccaatgcattggtagctacgattacgggcgactgcccactctggaacgcatccaacaccgtggctttgtcgacctgccgactgtggtaaacccggcaccccaatcgactggccaatatctccccggttcggaccaccggcgtatacacaatgaccttaccgggtcgactccgatggatgcggtcctagataatggctaataccggtggcgcctcgacccaacagatctcaaatcgatattccagacctacgatccgacgtaccatgcggtatgccacattgctacggtacgtaccggtgcggaacaactgcactttctcgcgcgtggtctccatccgcataaacaccctgtccacttcacgcggcggcaaggtcgccgtgacataccatctgcacgccgaacccactcaatcgacccagctgggccatcaccgaccggaaatccttctggtcgttcaacatcacgtggtactcgttgatatcgattcgctccaaccggtgctgcatacgctaccggttcaaaaaacccagatgatagggttgtccgcggtaagacattgcactcatttctgacactttcatctctggactattcacgcaggatgtacggtatcgtcaagaacatggattcgaatataaaggcatcaaaccggcgatacaagttttttcccgggggagaccacgaccgtacatggcaataattccattctccatctcgggtaagtatacattacctagtagagccacggtccgattatagaatccataattgccctaacccgagaccgtttattttatttttcttgttgtcttatctttctagaatcaaaataagaagaaatggattagtccaaccttgtccgcgcggacgagattagactgaatcggaaaagcgtgcagcgctttgacccgctctgactttgaagacagtcaattgtgtgcggccaacgcaaccaacgggcaatggcggagacctatactgattggcgttttctagcaatagtagcatttgcattgcgcggcgttgcgtcctctctgtcggaaaacataatgtaggggggagaaatcaaaagttttcatgtataatttagatgaggatagcgattggctactcagctagaaatagtttcatgatccctgttagccgaacgatggtctctatatgaagccgtcaaatccctgagcgcgctgggggatggttgttcttctgtataaaaataggttgcgtttatgagagcgtagaacagacagccgttaatacccgctgattgggtacgaaattgcacatgcaaaacataatttattatagtctgaaataaatcatattggtatttttcgccacaaccactctgttgctgatcacttagtcatagaatggaccgctaggaattgttttctagaattcagccctggaaatctcgctactgattcggcgaagtcatatgcagggtcttcacggtgtatcccacctttgtaaaccccttactctgtgataccaacgaggtaaagatacatttctccatgatgcttttgagtcgtagaacaattctggtcgcggaaatccaagcatgcatatcataggaggctaggcaacatagttttgatctcacgtaatatcatatatcgatcaaattgcgggctggaagagacctaggtggcaacatataagtgtcatggcatgactgccttccaaggtccaaaatcttttcccatactcagctatgtcgactgcaagaaacaacgccggtacctctttcaagtaccactccattcccaagcggatcgatgcggccattgtccatattcctctcgaccgtctggaaaaactgtatcccgacattcaacgcttcgcagctatggctgtcgtgttttccttccaccccaagagcccactcacgccaagagttttattgatcaagcgaaacggcaacgaaggctcatggggtaatacctgggagccaggaggaggaactccagatgaagaggacccgactatcctccattccgcggcccgagaaagcatggaggagacgcaaatctggcctttaagatttgctagcaatgctttcacgtgttctttctatcacagagatagaaagaccggcaatcaagtcctcatgcgccctctcggattcatcgccatcgaccatgaagtgacgcgagacaacggagagacgatcaaaaacgaaaagacgatggcgcaacgaatctggtccagcgggattcaacagccgctcggccaaagttctgtcaagatcagtgatgagcaccttgatcattgctggttcactgaggacgaggttcgcagcgctgctccatacgagcaagacactccacagggtccatttgctatgcttacggccaaaagggacatggttctacttgcctttcagttgttcagtcaatcccaaggccatagtttgccaccttcaatagatatagcacgctaggacatggcggcaaaggggaacttggcaaattgaatgagtctcttaggagccctcaaatgatggccacacagagaaagttcggtactttatttttggagagcattagagcggtaaattaccgttagcaaggactattgcagagaaattcactgtcccgtttcggaggaacccttccgaactcaagcagctttccatgttatgtccgttaattgtctcacgtaactcggtaactcatacaaaatattattactccatttggtcatagagttttatctctcaagagagcccatcttggaagcaaacgaacatctcacagattagacaatacgtcctggccatatatgtatgcacaaagctacactaggttgcctttctgttcgaatatgctcgtttttatcatggtcaagtaattgctcttatgctatatgcccatccgcacagttttgccaacatggaatctatacttacctccattgaatgcagtgcgagagctagctatgtaccctgtcatatgagcatgcctcaagcccttgaacagtatttagaaagccgtagctctgtgcttaaatgataagtcgacagcaaaacggcagtcctagctgatatgtacagatactgcaaggtcaagagctaagtactctaggagcgggagcggctctcctggagcgaactgtggtacatgcttaccacacgccgcactaaaactttctgaaagctcttataaggtaccatggtccccacacaattcctataccgttcaatctttcaaattaacttattattactactctcaacggttgacgcgagaaagcaaacggtgcttatgcccgataggtcctcggaggaattcgatatctgcacggtcacgggagagcactcgctactttcagtgtcgatactattctacttacggaactcggtggcgtcagaattggtaagtagatatctgagtataactagcgggccatattagcatgagattctgatggttggccatatcgcagtgggagtggagcatagttgccaaatcaatgcagccgagatggacgcagccactacaaagctgttttccttggctgaggtggtggagaggctgatcatgaagaatcctctacgatatcatagagcaccgagaaaggtgtaattcaccggaaaagctgctacgcgtcagccttgacctgccagccttctacgtcatatactcatcaatcagagcaaattgttcgagtaatgaagagatgagagcgaaatgaagatactggtgaatgcgaccaacaaaattactcaccataatctagagtcatataatcgtggtgatgcgtaaatgcggcgagaatccgtatcgtttggctggtgagaagacacgattgaaggtactatacgttttagactgcagatggtacagaatttggaggtaatccgtagccccatttgagataaattgcaggggctttgaaatacagctgtatattgtattacactaacgaagtggttgtcactaaacacagagacaaaatggttgaagataatcggacatgggcaaatctcacccgctttgtccgtaggaagagctgccctcgcatatcgatttcccaccagagcactgtttgaccctcgcggtttggaagatcgatcttgacactagggtgttgaaggagctggttcaaaacagcaggtgactctttcaccacactgtaccacagagcactctcgccatttgtgttcctccaattcacgtgcaaatcttttttacgcaacaaaatattggtaaccagctccgagccataattcgcggccgtcatgagggagagaaaccatcgtgcagcgcattcacatcggcccggtaagaaagcaaggtctttgcaaagtcgcaattgttgtttagcggcccagtgaagcgcagagctgttttggtacctgatattatattcgatcagggctaggcgtagcttgggatagaggattgagtttgtccgagcaagagcagaaatgtcgcctccctctagggtgcttgctatgatccaaagggtttctgttgggcagtcgagaatggaaatctgctcaattttgtcaggattcggaaggctcatctcatttcggctgttcataccatgattttgggcgatggatttcagtggaaagggagacacaacgtgctgctcagatgcttcttatcggtttcaaggtgacggtaataaatggatgaaagtaatgtgactaagttaagcgtttttgaatcaagaacctggcaaaggcgagatacgtgggaggggagaagcttaaccaacacttgcggtcaccggccaagcatcagtttccccctacctgccgacgtagcaatcgactagcggtcctaggaacgctgcctaagtttcttggattgtgtctcggttctataaagaccaagtttatatgagatggactttatgagggtgcgagaattgggaatctacgacatataaaagaagatctagacttagcccagtaaaactgaaagaacagcaccaaatgacatgatctaggtactgtaacggttgccaatctactgaagaccaattagttgaaggtttcgtacagctgggataaaagctattggtacagagacctcggagcgtctcaaccatatcctccggcatgccagtcttcagaccccgacacagatcatatctctacacatcccgtttgcttcatgtatatccctaacagcagcggaggaaactcccaggatgaacaatgcacctcctaggatacgcttcttatttcctacatatcgagaaacttctctattagggcctgattatgttagtaggtcagcgacctcacattgtgccttttcggccagctggcgtatggtacagcccaagcaccaacgattcgtcacagctctacgaggaatcctcagcgctttaccatgatcttatcagaatagagtcggtaccgcggagaacattttgattgctcctagaacaagagaagcatatcctgggagcttgtcttggatccacaattcgactgtagcaaatgaagaatctggcggcatatttgatgtggaatgattgatgaggccagcagatatcataagtagtgttccttctccatctaaacccccactagtacacgtatcgctgtccgtgatttcgaacatacagccagtacactcaacctactttacagtacccactatcgcaccgctcacaagcaccgcggattatctaccatctgctgtttcactacttttgaatagtggctatacattttgtataagaggcctagatcaacagtgtgacttcttcaattcctccactatgtctcttcgcccctgtcagccatgccgcagatcaaagattcgatgcaaccgtgaagttcctcattgtcaagcttgcgtcaagcgtggtagatcctcgttgtgtgtctatgaaatgagagtgtcagaccaggaacctgctcttccagagcctcattcaaagcggcaaaagaaagagcatagacgagcatctggcgagtatcaatttgaatggagagcttttgagccaggatacgaacggtcttttcggtacgaaacgagtacgaatgagaagatacaacaaatcgagcctgaaaaggaagcaaatatcaatcacttgcatcaaagtcattttgacaggggcgatatgacaccacacgagacgtcaccaaagagtattacagctacaacagcggacaaggattgggtttctcggccagagtatcgtgtggcagctgtggatgatattctcgaacggccacagagaatattaacatatcaaccaacaccgcgttatgcggagatgacccctccggtaatcaattgcaatctacgaggaaatttgagaccacaaggctgactctcaaaaaggcttctttgccaccacggccgaattttgatatgacgatatctgaaagacacaataatgacctacatacaacccaccaactattgttggtattgagctacctttttatctcttcaatgcttcctacggatgtaggggctttgtggaaggtcatatgccgatacggccatgactgggaagagagcttcgtcttgcagcgcagtcagcttcaaagttggctggtcagtgcccgcaaaattttgaccaactccgacgggctacacactatatctttggaagacatagaactccaaataagatacattctgtttatccttgggcaggaggcatcgccccactcgagctttctagccgaatgcttccaaagcgagtaccctccataccggccgtttggggtgagggcaagcgtcgcgttgatttgtcatgcctttgagggcatccggaccgatgaacttgagggatatgaatcgaaggaaatttggtctcgcgaccagaactttctgtcagtgatggcttcccgtctcaaggagtcgccactgtttgggcctgaaatttcaatgccccatctaaagtctatgataataagtcttcagagggctttccagtgtgaagaaatccgcgtgtccagcatgaattgtcggactctgaggatccagagccagttcgaagtattggggtattatagacgggcattcctagcttttgacccgatgctattgccaaaaattatggcttcattgaccgaaactaatgatattactaacctatctggccagcaccagcttacaaatatggagaggagcttggacagaagtaagtaaatctctgtttagattgatatggtgtttgacaatagtatagccaatttggccttgcgtctggccaacattatcatatccctcacgacagagcgcttggacgcagctttccgagatatccgcgagattcaggagtcaaaagcggatcaagtcgttgccatggagatgatgcacgtaaagtcattcgaagaagcatgcaattcgaacaggatccgtaagtcttagtatttcgaattggaacaggagaaatccctaatcgttgcagaacccaccattgaacccaccattgtccgtgttttccatgtttgaccgtgaaattacgagcggatttcggaatccgagtatgtctcttctgaaaagtccgagcgttgtatactaagaaaattgaaaattttgtaattggaaagagtatggaagccctacgcgctggaaacgagatgatcaacatggtttctagagatcaaaatgcaattgtttctcagtataggactagatccgattcttgatctgcgccgatgaatccttaattcgttcacataagagtcctatggtcgcaaagagcctccagcattagcggcgtgatactgtgcggtcggcctgctccaatagagggggccctggtatcaccgaactgtcgcaggttgctgcggatggtggtgacggaacgcgggctgcattctgcggcagcagcgatctaggccgtagtcagtgatttgctcaagatcatatcgcggatgaattctcgggtagaggggggtagatttggagccatattgggtcgtaggtgttcgtctcgaggtggtgaggaagggggtcaaggtggtaagttgcgacagctgcgaatattgtctcattaacgcttcggtgtattggtcttgtcaggtactttaggtttctattctaacgatctgcagtctagctagattgagactaggcagtttcaccatcgacctggcgttagggtctgggaaagttcctctatgtaatatggagtgtggcttcgaaggatgtctgaaagccatggacacggctggcaatccaaccccctaaggaatacagacagagtttgccttggtcatttgcggtacctcgcttttttctactcgaacatattctttgctactgatcgaaaactactgaactactgtaccgcacacttccataggaggacaaattcccgtgttttctgctgtttctgttaagcttactttattttttttgccagctagcttagggtctgcttccaatcatagggcaacccttactgttcgttgaaccaaggcagccgatgaagaatagatttcgaactgtgaaatgcaaccaatcatgctagtgagtaggtaactaacatgactcaagtagatattttctatgggcgtaaaacacagatgctgttggtgttcagtggtttttatgttcaatgttgacataaacgttgacatcaactttctaacaccaatcaccacccgtacatcgccaaagatggttatctgagaatactcagtgaatgtatcagcacgatactaccaatctatcggggacgaggccaaaggccccggtgctcctggaagcacaagcaagactccgccagccatctttcctactgtagcttgtcgcgcggctgaatcacccgcaatggcaacccccgagatatcggaaatgcacctacctcatgtttctattcatgaccaacccaaatctggcccccaaattgctcccgggaatgcgctttaaatcaattcgtgaatcaggcagcacgtggatactgtaactggattgaatcatcgttgattcaaatgacgcattggtctacgtaccgtggttgaggcaacaaatcaacatccgcagtcctcctgggagccggcactgattggtaacccgcgaaaacttgatagtggggatatctttcatggtggacatcaaacatagaaaagctcacgattatcctatggtggatgctattatgccttctttgctccaacaagttgctagggctgcgcatcatggatcacgagctgtcacacgtatcaaagaggtccaataccccagacacagaagaacataatggacttacatggcaaaccggtatcgttatcttagatccctttcttgaggaatccatcggctgacaatccatctccatggaggcaatgaatcggctgaaaacttccgtcaggtcgtcgaccagattgtccacggaaattgcgaccacacacgccaggttttacagccgtcttttaaccagtccactggctctatatccacagaggtagccacttctgttgctagctcgaggggctgtatgataccccaaagcgccataaaggctgaaagccaagccctacccccactgaacgcgggaaagagagtagcggacttcccaaccttcccacaagagcaacgtcaacgctcgtcctccgcctctgaaatacacggcggctcacaacgggcgacccaagaaatgcatcgaaagacatccctaaccacaacaattggtagaaaattgattatcgatacaatccaatacctacaaacgatatccgaccgcatcttgatctccgacaccatcccctgtacggagtgggccacgatgcatctcgccatgcaatttctacagagcaggtacgaagatatcattgcgggggaagagatggaatcaaacgctgtgtccgaatctactttcccaccgacacagccagaagagaagtgccggaagtgtactgctgcggatgaggagaagctatatgattgagaagctggctataatttgctaatacagacttctatttaccaaggtgccatttccatcattttgatgattctagtagaagagatagactcgcaagaaataggaataggatttcacaatgatcgcgtcggaaaaagcaaaaggaaattttcttttgaggtacataaacaacagtagattttactatctacagggttatcgttcaatttcttttgggaagatgtagtatatttggcaaaatggagaagtatcaattcgaaataaaagcatgctatctatcggtctatgtctatcagcaatcagtctaaacattctatcgatctaaaaattcaaacacaatttagcgtagaactcgaaggaaataaaacaccgttcagtacgccgcaactgctgtttctgcctctgggagaattgagcctacaactggaccttgggctcttctagtcgccgcaactgtgtcctggtacacgtgatacaaagcttcggctatcgttttctgtatcgctcttgtgcgttcatccatattgtgccaaccctcttcttctgccctttcagcaatgaaatgttctttgttgagtatggcactcccgccgatcgagagcttgggtccggcctggggattgacggtcgattcccgactaataccagaggaagccgaagtgtaatgggtctcatctcggtcaatgttgatcggattggatagcgacccctgtcccgggtgcacatgtgcattggatggtggactttgatgttgtcgcggcgggaagatttgtatcgcaggtgcactgaggtgcgaagcaccctgtcgctcaggcgactgcctcgctgctgagcccagtgggaaaggggtgggggaccgatcttcggtgcgcctttcggcgcctccagagtcgctctgtagcacgcgctgatagcgttcttcttgtttattccagacttctttgatctttgcatatgcggcgcgcttgcccttgcagaaacgaatgaaactagatatagggatccaagaacaagaattttgcattttttgggtatcttcgactcttaggtccctccatttgatcttcagccaagtgcatggatcagacatgtatattttattcgggtctctttcttccgaggcaatcccgtagatcccgaccacattgtgttttgtataccgccaacttctgttccctggtccggttttgagcagggaaatgcgcaaagttgggtcggaaatgttgttcattccgtcattggtatatccgtttctatacttgactttgtatctggctccgtggcgaggtccgtattggaggatgacgaaggttgatcttcgtagtgttccccatccatctacaatcgcatcggtttcctcgtcatcgtctgatggatcaaggctcgctagaagttctgggtcttggagctcgtcatcacttcgaaaattcggtgacaggctagtttgattccgtgaatagctggtcatggaagggtgttgatgcccactcaagcttgatccggtttcagtctggtttgccaagccagtgtcaggcatcggagtatcatctctatcgctcggagtggcatccctctcgatagactgtatcactgaatcattcgatgggggcgaaagccttgccgtgtcagttgggtcactgtcactaggagcgtaatcgtatgcttcagacgagccatctgttgggtggtgcccttgtggaacagacttctgtacagccccactagcaactttttgaggagagatagtgttgttgtttgccccttcctctaattcaatgagacgagataatatctctttgtccttgtgggatgaggtttttctaactccactgtttgaagccatattgagagagcaggcctggatgtttccgtgaagagtgcaggcttttcgcggtagatggtgtctatttatgaatttccgatatcaagtcatctgtatggatgtaggaccaggttatcgactgtggcgtacaagtaaatgcgttgtcctctgattttattttctgtatttccgttatgaagatcaagtgagcaccaatttacgttctagctcgttgggatcctccctcagaatacagagactagatgacgcactttatgtggttctgatgagttctatagctcagagtttgagtatgctctcctttcgtaactacctcgaggttcaattttggacccgccactcatccgggcttcaaatcaagcccgcattttggtgagcaagagaataatcaatatatgaagactctagtctcatttttcctcatgagaacgttatttgcgacgatgtgtagcagggtgtcgctcgacaaacgcaaatatattgacctcaggaaccgattgattatattggtcaggtttcatattaaaggaccgcattaagccaatgaattctcgcaagatacaaattctacttgtgtttcttcgcccgcaggagattaggctcagacagtgtcaggtcatgtatctcgatcctgaaaatctgccctctttactattactgacttggccagaactctatgtagcagctcacatagatgctttttgctcttgagcaaaaatgacttcatataatatcctctagccgatcttcaatctactgaccataaatagttgctgtgtggatgtctcattgtccattaaacatttcgaggctcggaccaattttatcggatgattgggatcaatgatgaatattgaatgagagatattgcgagggaatggggtatacgcagttagggtatcttacgtacgcactggcaaaactggctaattcccaagaggagcacgttttggatgatctttgtgaggataggactcaggtatttgagcagaaagagggggattcataaaggcggttgacctgatatttatgctctttttatgtttcacctatgtcttagccttgaaataaatcatgctggcaccaggaacaacaacaacccgagaacgtcaacgttcattaataaatagcttcaacggtatccagatcatgcgcaataatatgaatggttactcaacacatttggctacgcaacgtctcaatatggctacttgaactaaatcccattacactcaattaatggcatgattaaagagcttggtctgttaacacaacttccaccactgtatgtcatatgcgtatgtagctccatatagctattatattgaacaaatatttgatctttccgggaatcacagcatattgatctggggaatcgattaaccaaaacttgacatatcaaattcctcaagacataccctgtcaataagcttgtttgctaacaacatccaacaccaggtgggtaagttcgtgtgttttgctgtagcattgttttgggcattcgatgcgatcgcaggacactacaggcattctggcagtctctagcttaacactgccccataatcttcgtgcaagccttcaataatccactgctgctcttcagcctatcatagatactctgttctcataagtacatagtcgaaggggagttgttttagtttacggcttctcggcgctcaataactcttacagcaaatttttgtttcacggggttataacagtcccctacttgtaggccatcaggttattcaccaagcactatagcgctcaactcgaatatttgagttttggtttactcctttcaccaattcggccaaaaggaccgttgcttcgctcattgccctaacgttagtggaagagagctgcgacccctatatagtaaccacatttctacgatagtgcttaaattgccgttctcgtcgtcatccataacgtgaagtaacagacgaccacggtcccttcacgtaaagaaaacattatttcccttttgcccaccaaaggctcaaagttctaaaaatcaacctttcgcatttttattttagcacctgttttcattggacttctcttgccaatcagccttacaagcgccaccttcagcctagcatctgtcaaaggctatcacttcctcagagcaaggcatcaacttacaatggctgttttgaaaaccacccgatccaagaattcatcgacgaggaaattgatgcgccaaaaacagtgtcgtcgtaagacaaatatgctgaaaaaggcatctgaatatagcaagatgtgtgatgcagatgtatgcgtaggtattcgcatgcgggaaaccggtcaggtgtatatcttgtcggcggatgcttcgggcttttgggcttttcttactttgcaattggtaagtaaactatatggcatcatctccaggcggagcgctaacttcccagagctcttattacccgactccgactgtgatgacagatcgtgatttgtagaaaaccagggaggagatagttttcagggagcagtgataggctctttatgctgtatactagagtatgcaaatgtattacaatccgtcttgcagtatgtttttgcccatagtcctttttgtgaaaaacagttgttgcttttccattcactctcgtagttggtatgtcgaaaagtacagtgtccaaccaaataccacagtagtctacaatatcattgcgggcttcatgaataaagcaggaagaagatcgaagcttgaccgggaagagccgccaaattgcggcagggaaaggaagatcagccgccctgtactgaaccatatcatgagatatacaccttacagtacacacagttggcgatcgtctgattctgcagtcacgtgatgagcgcagaattggggttcaacgttgaacgtaaacttcagcagacgcatgttttgcaacagagatatggtattttactgctggtaattcttcgatgggtactcgatgatgatcattcctaatcatcaagcttataactcagcccagagagccgtaagattcctttccatctttctcgccagcaatgatcaccgaatcaacatcctaagctgctttcgaccgcccaaataaaatctctagtcaacgttgtccgaacagccatttaggaaatgagatattaactcgctaatgtccagtattgcctatcctaagcatgtcccgccctgtttcaaagtttgccgaatggcttgccagagcttccatccaagacaaattcggtctgtgtgggctccttgcccttgtatgctggatatgctgtagcctcggacgcagattcagtcatttgcctttgaggttgcagcaaatatcctggagaagtttcttccaggcgccaacaccaggcgtgctccagtggctagatatcccatcatacttgcaagggggggtgcttgcagtcctactgattgccaacattattacaatcagccttcatgctcacacctgggtggatgtacagaagcgagccggatgcttggcggtcacacatcttattcccctctgctccgggttcagcttcagtcttccggcccacgtctactatgttgagcgggtcaccttccaatgggcccatcggtggctaggccgcctttgcgtgctgcattgccttcttcatgggtccatcttaggagtaaatgctcgcaatacaagccttggagctcccctcgccatcccactcctggtacgtgaagcgggtctgaggacggcggccttcctactcccccgcagtatgtctgactagaagtggctcacaatgaacaggccggatgtagtctcgtctcgatattgccttggacgttggctgcgatcctccgccggtggccgcaattcggcctcaaggtccaccatatccttgcttcgatcgccaccggcgcccttttctaccatttgatcgaccggggatcgtcctaccgttgggttttacttggtggtatctgcgccggatgtgcctggagtgtcgggacatgcctgcatactatgtggttccacaggtcgtggcgcatcacctctagacgggcactcgcgcggtctttcaaccagctcttatggcttgatattgtggttcccatggggtgggaggctcaaccggggcagtatgtacagctctggttgccacgcttaggagtgaggtccttcttgcagcttcctgcattctacgtggcttcggcggacacagtgcagaacgcgtcgggagcaccggccactcgcacattacgcatagtgacccgaccccgaccgggcgtgactggaagggtcgcacaagctgcggatcatgcgacgtacttgacgattcattttccggtctgcgtgctgggtccgtacgggcatccacctaaccttggccagtacgggaccgtcgtctttgtacttgaagacattggactcttccgcgcgttgccattcatacgacatctcgttcaagaaagccgaagccggagaaacacggtgcgaaggctagaagtcctatggcaagttgggctgaaacatttcagtgggtttccccccgttcttctcagatgctttgcggtgtggtgtacttaccggaatagaccatccccattgggtgggggatgaaatctcgcaaatcctcgaactcgaccgtatgtttgatcggaacgattgtcccgagcatagacaccgagatggccggggatttgatgtgagtgaagtctcccttctgcggtaactcttacaattgatcgggctaacttggtggcagatcctgcaattcactacacatatcctagacactcagcccgtggaccagattcgataccgcaaccgtacgcgcttaaagtaccattttcatgccatcaatattgccaaggaactgccacgccttatggatggtacgggcggaacgaccgcggtttcgggtatgagcgctccgtcgtttaccccttgatgatgccaacactaacgggtattagtatgcgcaagcaagccgacacgcgcagcagtacgccgcgtcgttcagcccagaacgagtggtaattgtcggttatttgacctgggtctagaaccctcctgcaagtgggcagacggtgactctttcgcccaagacacatccgaaacaattacagcgccaacagaaccctccaatactggcagagtatttgagcccgattggacaccgagtgccatacccgttgcacatgctgttgttaagcaagctacccggccgtccgggggaacctcggtggatcatagacgatcttgccagagtgataatccggcggttggagggcagagcgctaatcacaaaaggtgggtccagcagaaaatcaccgaaggcggcgtctaggctagccaggtatagttatagaaacaaagaagcctgcactggacagaggaccaaagtatacttttgcgagaaccaggaggatttttagcctatcaatctggttgccgaagtctgcgtgacattcgaatccccacctggcccaaccgtaccttctacgcaataaagacccgttccatctgcatttgacgaccgtcagatctaggtttgtagatcatgcctggacctttgcaaatcctcacgatttcttctcctagccacagagccgtaccagcgtcggaccacacccatgcgcgttgttttactgctgcttcttgcgtccgggtaacatcagagtgtgacagtagcgccatactctcgcgaggggagtgacgatcgacgagaagccagatcatgaggcttgatagctgcaatcttcatatggctgtccatccagtctcccccgaaggaatcacaagtatcgtcccgggtttggggctatattcatcgcgtttgtgccgccaggaggtcgaaatgttattgactacaaggaaacacaaacggcactttctagcactcgagcagtatagcgctagcaaatctacatgataaatcaagaggtggtctcgttggcaaaacggatcatccacgggcaaaatcgagtgtgaccggaccagagtgatacatatgaaaggagccgcagcctaggaaaattcatgattttggtccttatactctgatatatcagtgtccctcgcttgtcagtaggatttgagaggttctatggtcacggttgtcgctgccttgagccccgcgacgtggaagctactttacaggatgattcgcgttaagagtattctacgcgggggatgctgtaagaacaaggcctctagcaatttatagtctcgtattccgaagaacttatcattagaaggatctaatggaatttagatagatctcgcaaattcaatcatcaagatcgtagcattaacaactgaaagttcttcctcatcgggtgctgtattccccttccttgtactgtggtgttttatgatccgatggagttcctccgccgccattgattgcggtatcagccattaaggtatagagtagccagggatataagtgttacggtgagcgttgtggtgagtgctgtggtgagtgtggtgagtgtggtgagtgtggtgagtgtggtgagtgtggtgagtgtggtgagtgtggtgagtgtggtgagtgtggtgagtgtggtgagtgtggtgagtgtggtgagtgtggtgagtgtggtgagtgtggtgagtgtggtgagtgtggtgagtgtggtgagtgtggtgagtgtggtgagtgtggtgagtgtggtgagtgtggtgagtgtggtgagtgtggtgagtgtggtgagtgtggtgagtgtggtgagtgttgtggtgagtgttgtggtgagtgttgtggtgagtgttgagatacgctgttgtggtgagtgctgtggtgagtgctgtggtgagtgctgtattgagtgctgtgatgagtgctgtggtgagtgctgtggtgagtgctgtggtgagtgctgtggtgagtgcgtgagtggtcggtgaaggagaatacctcacggcgggaatcggaatccatcgaattatgtaagtttcttaaacagggcgttcaactttggaaatctatccggttaattacgtcgtcatcaactgtcatctgccagcaataaccactaatgtggtaggtaattgattagaatgaaggtgtatccttctatatagtgtattggatatgtcatttccgtaatagttctatccattcgataggtagacagtatattgtgtgagaattcgtaggttcaataagttttgcgattatatatatacacttgatgcgcgaggattaactgctttcatgtatcttgaatcacaattcaatttataaattctcccttattgatttccacttaagccgaatatattcattatatataattttagtcaaatcatttgaatatatgtcattctctgacatttacgtggttaaaaaattcaaaagtagtatcggcaagctgatcgaatgttgaaatgggaccgccaatttgtagcgcctcttggcacggaggaatatattaatccgaattccgagagatcatggcgcttacttagcgagtagtttttgtctagtttttcgctatgcttttggctcaaaaaaccgtggtccactacatattcaaaaaccgccattgcacttttgcgcttttgcgcttttgcggttttcgcactttcataacgtttgacgttctttaaaagctactccctagccaacaagtctataactataagagcactcacttccttatttcttaattctacattccagcaagtctatttctagagtcccgaggcatatttcaggctacaaactagcagatggcgactacaggccctcgttcaaatggctcttcttcgaaaagaaaatcaatgcgtcaaaaacaaggtcgtcgcaaatccaatttgataaaaaaggcacgcgaatatagtaggttgtgtgaagcagacgtctgcgtcgggattcgccttcggagaacgggccaagtgtttatcctatcggcggatgtctcgggattttggggatttcttgggtcacaactagtatgcaggcagaaacgagtcatatgaccaaggctaacttttctaggcctcttattatccgaccccattttttaatcacagatcaagacctggagaatgccgaagaaggcattataaggaaaccaagcgaggcaaatcttctagcttgaatactataattgaaattaattccccgggtgtgtcttgccaagactggcttgagtgcccaggggcatgtgatctcatttcaatatgattcgtgacaatgcaccgaatattgcgaatgctattgccaaagttgttcaagaggagaaagatgcctctattctaaggtcacaaactcagcacaaaaatcgtcaaagagttggggctcgggatattagcgctccaggcccttctatgaagctcttccttccctttcctagcatttggggcagaaaagtggaggggtgcagactaccaccgaatcgaaggccactgcggggacccactacagcgtgagtatctggctgagaactgtcgtgcgcatttcctggtcgcctctagactatcttaagactgggttaagcctagaacgattggactaggagagaagtagtttacccgtgtactgagtctcttgatttaccagttactgcctagtgacttttaaagattatcagcacaagctaaaagtgtatgaactggtatgcattcaggacaaatgagactaagcggaaccaattcaggatgaaaggattaattgactgaacaggaagacatgcaatctagggcatgttgaattacccttgggccatacgctgataatcggtagcaacaacaccatattctcaactagcccaaaatgactgtatgggaaagttgctagcggtaagttaccgcttcaatgctctgacaaccatcgaactgcgaaaataaagtgctgggttttcgtgtggccatcatttgagggctcctaagcaactcatcctgtttgccaagttccccctgcattgtcgccacgtcctagcgcactatatctattgaaggtggcaaattctggccttgtgattgtctgaacaactcaaaggcaagtaaaaccatgtcccttttggccagaagcatagtgaatggacactgtggaatgacgtgctcgtatagagcagcgctgcgaacttcgtcctcagtgaaccagcaatgatcgagatgctcatcactgatcttgacggaactctggccgattggctgttgcgtctcgctggaccagactcgttgcgccatcgtctcttcgttgtcgatggtgacatatgcctgggaatcccaagtaactatggctttgcaatcttttgcatacatatcctgttgaagaaagtatataatgccatactccgggtcaccgtagtaggacggacgtgattttcattccctgcgttttcgctatgccttggtcgttcgagtatgcactacatggctaggggtggcggaaaaaagtttgtatacttgcactcgctatatggccgcgcgcttggcagagatgagatcttcgaggatcgtcacgatggcttgccggctgttatcgcctgtgttgacgtcctcaaaataatgcgttcgtggccggttcgcttcttcctccgcttgcctgccaaacgccaagagcgcttcagtgccacttaattcttcccggaagcagtgttgctcggatgtcccgtcgttatccgagctatcgaaaataccgtttttgtccctgggtgtttttgccaactccgtgtggagtgtaaaaccccgaggtgaaacagagaaagaagagaagctcttaaatccgatttcgcgtattaccgttttatctaccctacagtatcctgtcttcacaatcaaaatcaaatatttctcttctttgcatcgagcttttccaccgcagcaagtcttcccattctttccaaccagaccctcaggtcaaaaattccctcgctcaaatccttccgattccctttaaacttgaatgtatatccgacatcgtccgcgggctccttcccatcagtatagcggatgcgacaagggctggcttggtagttttgtgtttcatatgctgcaagcctctccccatgttcaaccgttttgacatgatacactgcgccctcaatcacggagtctggagcatccaaaagtgcagggtattgcccccacaacttgcactcatagcccgataaacgtgctgggcgtagctcgggctcggtttccagctccaaaatttcacgaaccatggacgggtcggtcaacgtgccatagaagaaatagggcccagtcggtgcgtcgaacaaatccacgtactggggcgggttgggtgcttggaagaagtagtccgaaggggcggttctgagttttaagacgtagctggagattttcgagccaggaatttcgggtggtggtggtggtggtgggggcggactggtgagattcatctcctctcttgcagtattcgacataatcggagttggatggaaacaataattataactccaagaagtggaatagatgggtatacagttgaacactagaaagaaggtctattgagagtagtgctgagagcgaagtctccaatggccattgtttctgacgcctctagtgtccgttatgtaatcactgcggggtccgcctaggctctacctgtctatccacagtggtctgggctgcttaccgctcacgctagcagtagtgcacacgcaactgtccccagggatgtccccacaccaccagcgcttactgaagtacatcagcggttatctatatttactgttgttttagccaaccagagcctaaactttatgggtgtggattttccagtgagtcaacagtgtttcagaagggctcccgaggaatacgattgctcgctatagtggataaagaggcaattgatgagcgcaacaagcgcccgatggtgatattcttagttgtcggctgctttgcatggtttcaggtcattgcccacttccatgtagaaggctactataagtatgggcatactgtcttctaattgttatcacacactgggttttcactgatttgatcccatcatccttggtgttgtatgatcttcatcgccattcgtacttcaaaatcccgtatttcgtggcctattctgctctagtatattttgagagagcttcaatgtctcgaccccccccaccaccaccacctcctcccccgtcggcagcaggaagaccaaccagtatgttaaacgattttgtgacaagcacctattttctattctaacctataatgcacagtcgggaagagctctgtacgagctgagacttctagctatcccattggaagctttggcatcggagtcgaggttgagtttcttctacagcctcgtgagaatatcaaggcggccgatgatatcaggcaattttccaaggctgttgcatcttcttataatgcttacatggaccaatccgagcccggtagacatccacgtatgcataatgcgatcgatgaatcctacttagggcccaggtttgccgaatggtcccttgactcagattcgaccattgaaatgccgaagaaaggccgtgcgccatgtaggtactgtccttgccacaaataataaggtctaacaaaggataaacagggggactggagagcatttctccaatttttagggcacacgagggctctaggtggcgtcagcatgttgaattcatgtggagatttctacttgcggatttccatgtcgattctaatgctagttgcggcacccatgtacatctatcacgggtgggaggttactcattgaacgacctcaagaagatttgtcaaagcttgatacacttcgagccggcttttgaagccattctcccagaggaacgactcggcaatgaatacggacgaagtaattggctggacaacaagaattttggacaccaaaatttatcccgaaagcagagcattgccgttattgagcgagtttcgaccatgagggagctagtattactcatgaaccctgatcatgacaagatgtttggttggaactttctctatctgctgaacaatccccacggaacaatcgagttccgacgcggagcggcgagtacttcagtgcaagacgtctttatttatatagagattgcgatgtcctttctcgaggcctcggtccgactgggagatgtggaaagactaaagagtgtgcctgccactgtcggcggtctccagtggttcatccaagctgcgaagctaccagacggcattcctggattatttgactcccggtatcttaagctattcttcgctgggaagaatcaaagtgcattccgtgagccaaaaccgctgggtaatctttctccgtacaggctgaacaagttaaatcggaagaaggaagaagacaagagaaaaaacattgccatggtcaagattttgcaggagcctttttggagctgattaggtcttatggcatcaatatcccgatttatttctctgcaagtcgaaatattggcacttactgtcttacctgtttttcatacgttcttcttgattgatcattgagttagctttttgttacttctgaggccctttccagagtttaacgggatggttacataattgacattgtcctttaacgatgtcatattgaagttttaggtatttggactatcttccaatctatgatttacagcatcaaagcagccttttgtgttctatgtaagacgggcgtatacgaagcttgcggaagaagaggaggggaacattgttttacacactaaaccttcataggcagtaaagctcggcacgtactgttttacctgtgtttcatacgtttttcttcattgatcattgagtttgctttttgttacttctgtggccctttccagagtttaacgggatggttatatgattgacatttttctttaacaatttcatatatgctattgaagttttaggtatttgggctatcttccaatctacaatttataggccttctagcgagccccttcgcccttttgcctagttaccttctagcgctacacatagccaaccggtcataatcagtactgtaaggcaagtaacgcgctgcggaagttgttctcagagcctactctcagatcttaacctctaaccgcaaagcgcctgtcatccataaacgacaaaaaaagcccaaaatcctggagcatccgctgataagataaatacttggctgggttcccgaaggcgtattatgcccacacagacatcagcgtcgcacatcttgctgtattcggacttgcctttaatctggagatcaggcgagttggaatggaaggcgacccgctgactcattccaaaaatggcctgaaaatggggttcgtgggcgagtcgccagccatatgcaacctctatagcgctgccaactacagtattgggtcgccggctagcctagagagttaagcaagagtgggagtgtcggcggtttgaagtttcacggtttaggcttaacacccttttgcacacggacattttgaatgtggcagaatcgtcgcagaaatcggcggtcggtgaagaagggtggttagactcctcgattccctcacacccgtccataatcagtaagtctgtgtctgactgcaataatcgttggaatttgacatgaagctgaaatggcgatgtccagcggtattttggttcagaatgactcaaaatcgcgttgatctaaccagtgcgtacagcatagcaccatgcttcttgagggacatggcagggttgtgcttctatgcttctccaaagtggagcagggagtagcgtacgaccaatcatatcgacctactagtgtgatcccagagtcgttctgagaaacctccatagcctatagtcatatattctagcgaaatacaagtttgaaggacaagaagacccggaatccggatctgcccgctgaaaaaaacgagcacgcgtcctgtatctcgaatacgaatgcctaggcaaactgatgccattctttcttcagattcaatctttgtcggtcccaactttgttgaggagacttcctccgcattcctgtttgtcgatgaattggcatactcgcttgacaaggaacatagtgatgaagaaagggttagctctttttttagtccgggtatatacttgacaggcctgaaagagaaagcgaataatcatgataaaaaggtcgatgcaatgaatggcactcctccacactcagcacgacacgtaatagtccgaatattcgacatttacatggagttgactcgcgtacaccaaagccacaaacccacggacattttgcaatgtatcctgcatttgcgtgcaaaccgtatcattgttcctaaccctcctaatgagactccgtttctcggcctcctcctgtcaattcttcaagctgatcttcagggaagcacgacgccctaccgaccatgaggtattcaagaggggctcagcacagacaccgacgtgatgctagtgggggctgatttcattggctcatcagatgggcaagaggggtgggtacttgcacgtcctgaagaaccatgataaaatttaccgagtttgccgcagcctcagtgatgcgaacgtagtcaaaatgacacatcatgtcttggacatgatgcatctgcttgcttaccatgtatgatgctgtcgactaccacaaatttggtaacacgtcgcaaaaacccccgcacttgcatgcatgaaaatcaccgtattttcccctttcacctctgaacggtcaatcttatatagttcaaatttcaattttcaagatctgcaaactcaaagttgtggtccttagttcattgccaggactttgaacgaagtaaacgttcaatgttcggctcttcgccagcctggagatgccagagattttccaactcgcatcagccaaagagaaaaggtgatatttctcatggcaaaggccctgcgtgagctttaacgtttttgacatgatgatagacatgtggacgaaatcgttgtcttaatgtcatgtacagtcatttctatatccatttcagtctcagctgacacatgtgtatgacgtgtcaaaatatcgcacgcactagataacacaaagtacctctgtcaatatgagaaagggctcattaaatagccaagcttacacctcgctctccattcttcagtctatggagaatgactcgaaatatttttttgctcgcatattgtttttctcggattcaatattgaactgtgttccctgtaacaagcaatttcgctctcaacaagccttggagcagcacattcaggttgggcatcgttgtgagctttgcaataaatccttccaatccatccactcaaagcgtcagcacaccagaagcgcaaagaaccattccatggagaatcatcgccctgtagtcaaagctgcaccaccacaaatgccagtacaagactgccaggaagggaacgatcaaccacctgaattggggattggaacgaatggcgataatctgaatcttacatatactggagtacctcgagctgcagtaacaccggtcttcaaaatagcatgccgcctccgtttcatgaagcctgacgtcaatatgctactgagacgcatcgatacccagttagacactatggtcatctcagcgcttattgaagctgcccttcggctgttgccgcctgataactctcccaatggtagagccgaggcggaagaaagaatgcggcaaaagagagagcgggcgctcatccaagaaacgtcttttattgaccgaatgagagatctcggctatcaatttcggaccgagagagagcaaaaggaattacgacttagcccaacacctgacatccgatttcttgagccggtatcagtgaatggacattcctgctactggatagaatacaagaactactttgggtttaaagcgaatccatttatcacctcgaaaaacaagaagcaatttaggaaatatgtgtctgggttaggaccaggtgctgttgtatacaaattaggatatgaaattgaacacatagcaatgattggggtcgagacattccgggaggctgaatttctcaacaacctggagcaagagtcaaggctacgaaaatgagtgaatgactcataagagaaggttttgaatgttttcttggatgcatttcgcatggtaatatcaagcccgagtgatctaaatttctgaaacgctttttgagggtcgctcttaaacgtgtttataggcgaatatccagataatagtagtcaataactagatatcagtcaagagagggggggcaggggcgagagagttctagtaatgtccatttgtctctagattcctaaccattacttctgattggacaacgtctcatctagcgttgcagcgtaataaagctggctctgtatctaacgtaattcacaagcgagccggccatacaagccagccggccacctcgacactatagtaaatgcgatgtattctacatttaatctctttatttgtcgatagtcattgataaggctcactagcgttatatatcaatatcaaagaaagcagagagctattttgtgaccatttcaaaaattaccgaaaattacgttgctaaaagctagaaatatatatcatgcaaccacaaaggcatcaatcttttttaaacttcctagagatactagatatgacccaaaaagcaatactctacaaggaaatcttcatataaactaccgttgttgatatatcaagttgtaatttaccgcatttactatgtgttttggggtggccggctggcttgtgaattacgttatatcatctctagatatgccacttggctacttggtggatgaaaaactctaatgaatgacaaaagctcgaagatttgactcgtattggagcactgtaatgccagcagaaatagcatacaccgctggttccgccaaccaggcgctataatctcggcaaggtgcggggtagattggtcttcatattcaccaaccttgacaagtaatcgataactatttcagatttcttgggcttcgtgatggagtccaaaaaagcgattcaatttcctgagtaaggctcagtatttgccatgcggaaaagaaaaaatttaacaaacattagatttctaggctcggataccgttagcctttgcaccacatcgagctctgaatcatggaaaatccatcgaaagctcttggtgtcaaaatgcaaagctttggaatctgctttttctcatgacttcccggagcgttcatctggacagtatatattcaatcaaacaacccacgatactgtcgcacgtttcatcgaatgggcataccgggacgactatacggagctagatcttacacctatggaggtcaatcaaagatctcggccgagatcagagccttccgggccagctaaaccaagcgaagacgatcatttgcaagcgcacacattgctatgccacttgagagtctacatattcagcgacacatatttggttgatgatcttaagaacgtagcatttgaaaagtttacgacagttgttaaggatgtgggaaatccccaaaatttgaatgagcaacttgcaattattgactgtctattattggcgttctcaacacttcctccgcacgataagcttcttgaatggctagctcgatatgccgcttggtgcctctccagcttacgtcttcaagtgaagtttcatgaattgcttcagaaaatcccggcactcagctatcgcatgatggaaactttaagcccggccaaggaacctccttggaatataaaattgtcgaaataccgtgtcccctcttacgatgctcgcactggtgaggattttgcctatgaagactagtggaaagggggaagcatccacgatctcaagctctcatctctacaatttctatgatgtcttttcaagttctatagcaatatcacgctctcaggaaactcgcctaattcaaatttgtgagtgtgatagaaattgattctgaagatgctgcgggatccttgggcttaacttgcctattgtaactttactagttaattgatctaggcgatgcatccttgtaattatctaatctaatattctagtagacttaatgaaaattggattggaaagttttcatgagcattgaataagagttcggattggtcttgcttgagaaagacaacgtagtgggcatgttcacgatatatgctggcgatggatctgatttagttcagacagccggagcaaaaagcagctgccgaaaccgaccaaagtggatagcaggctcttagcattttgacaatttacctattatttatgtatattctccctccacggataggatcaaccaaagatgcgtcactccggcgcagcccacgcaatgccaattgtaccccgcggagcagatcagcaccgaatggaggatattcttgagtcaggtctgcaaatttatagtcgtcgcttcgcatgtacccttcgaccgaagcagcagccagaaggcgtcgtacagcatgatcatgaggcagattcaacgccgagatgatgtgatcagagttgataaaccaagtgtttcgatcaatgccgtagaattcggtatcagcgtcaagaagtatatcttgaatatatttcgccatttcggtttccaaccctagtatttcatacatgtctgcaaatcttaccagctccatggcagcagagatattctcctcacggttcttgatatcgaatctgacgataccacgatatagccattgaagaagtccttcgagggcacggtttgagataataccatccatctcttctaggtcgagtgcttggtcctgtgattccttgaaatggccgtttttgaacatttttgtgaagacaggtgattttgcacatagcaagtctcttgagattgcaatctcagcatcacttgtcttgactcggattttgatagtaggctcatggtagagaggaagcatcctaaattaaagccaggaaaaactccgttttcagggccgcaaggcgcacttgctctttgacgaaatcttttgcactaatattgaatatctcggccattgctaagaagtgcacaaagtgagtaatcgatagtattgctggatatgcctcagtgaatgctgctgaagagaaaatggcggggcaaaggaacatgaaaaatggtggtccacatgatacatctactaaaaaagggtcacctgaccgaacaagaaagataagcggcaacctgactgacttaatcatccgattttgctcaaagcctactgttaaaggtgatttgtgattgcgagaaatccagcccattgaatacaagcccccgcatgtttatctaccaatgtcgaagcgtcacctgaaccgagaaaattaaacgcgtcagtccgtggacagctcaaccgtcaaaaaaagctaccgatagaaattagtggagctgggaatggctcaattctggaaagtctttgacctgtggtctcgggaacgtttcttccttgcatcgccagattgaacttcaacctccgcctaatatgaccatatccatataagtgttggcgatgaacctacccaaatgactacctcattgccaatcatgccaatatctcaatcggagaccaaatggtgatgaaatacatccttcagcagcgggaatgtctgccaagtagatatgaacttgggcttagtacggttcgctacgataggtgcagtcgagccgcccctactttgtagtctgtccgggctcgttagttcatccgggaccctggcctacctgtgatgtgtatgccatctagaacattgttctggcctatttttattaaatgcatcttccataccttcttttcatcaagggcccgctggcgattgagacgccaagcaattgaactgtggtagcaaatcgatcctctggaccggcatatgaccacatctaggctgtcggcaaacatcgttgccgcatagcagagaattgaatggagattgagagcgaatatcgactgatggtagacctcatcccccgtcgcttactcttgttcactgcgcttacatctacgaagagattgatcacctgtaataactcagacggaaaccggcccgttgaatgatcatactttgctaaatcatatagtggaggatgttccctgacgccaaaaaaacccgccctgctataatcagccgctctaatgtccaccaatcgtgacgtgtcgcctcagctgaacagattgaacggctcagtccgtatcaatgtccgatcctgattcttctttggggtagtaattacgttcggtagcaaggcgatgaacatcttctgcgtgtctgcgaagatgcatttcatgtaggagatcctcactacacatatgacatctccgatcctgtaagtgcttttctcgaaagtgtcgcaaagttgatttgtattcgctgtacttgtgtgttcgatgatgaacggacagcagcttattgccgtaacattgaaagcatcgtcgaggttttttggccttccaaatatagtttcccgccttctccagaagcaattgctcctttgacatttcaggagagatcgaggctaattttgttgtttgctctttcattgctgagtgctcttcgtcgtcttcatcgcttggggccggccgtttacttcatccacggagtggcccgccttcaaggtgatgacaatattgcgagatagcagcgacagcagcatttcgtctctgtcgctctgcctccaatgaatgggaagttggccaggtcaacaacttttctagaagatcaatttgctctgacagcatactgtctgttcgcaatacgtttttcgcttcctcgttgtcgatagctgctccagagagctgtcgctcaatgtctaggttcgcctgtttacggtcaaactcctttcgaactttctgtctcaatgccctctctagccggccaaaggtgttgagcttttcgcgtgcgagtctgtcacgtcgcaattgcatctgttcactcggatcatagatgcagagttcagcttgctcatccaatcgccggaccgcttcgacatactctggatgttcacggatcgacgctcgttgctcaggagtcagatgccgaggccgtctggtatcaatccacctgctcatgcgggtgattgcacgcatgagagatttgttggattggcggccgttcatcacattttgcatgtccgtgtcaacatgtcgcggaaggtaatggttgaggaatgtgcgatcagcgtgcttcatgatcagattctgctgagcttcgctgaccgaatcactattgttcaacatctttccacctccatagcgcatgcggtgcgcaaacatcgactgaagccaaccatgaattccggggagattcatggttggcttcgaggaccggggattcaaaagcctgcagccagaaaagtataccaaagatgaaaacgtgggggctgaagataagcgacggatcgtcaataatttcggggaacgcaaaagtgttactaagaagaatcaatcatcaggccctttagcatcaaggaatattagatactcacatagcttcagacccgaagaaccgcttcgtatgctccgacctgacctcggccagaagcacgggagggccaccctgaggatccttttgtatagagaactgaagatgcttcaactgcaaggacagcagagcactcagtcgattcaccgtgaatatgccaagcatgctgaaaagacacatctgaatacgctcgtatccgaaattgaacccccgttcctgtgttcgaagaatggtctcattcaattcggtcaagtcttggacgtagactggttctttgcctcgctcttggtcatctagctcgaacttgtcgatcagtttccgaatcccctagaattcctattaagatacttggcgaactagtagactaatcgagcacgtcggaaccgcgaaaatatgatatgtgcgcccgaataaaacaggtggtagagggctcataggtcctaatcctccagcgactgttctctatctctatattggcaaccattagcttcacctgttgctttacaagataacagtgaatcgaggccaatgcccgatcaacatccgaaatgattgccgcactagaaatatcacttagttctctcttcttttgcccacataaattcaataagaagactttcgtcgacgttcttagttgaattatctctgttgcttgattggcagtttgcagttttgtattcagagatgaacgaaaatagaatcgatcaaataattagtctaccggaataatctgttcaacttctgactgttctgctggatagcagcttggggagacccgagtggttccctgcgaccgaaaatagcgacagcccgacatctctcccttccccaatatctcctggttggagcttacacccactgcacaaccaaccatggaggaaacctttcggtccttaacagcggagaaaatccaggagctgctagtaatctgcggaatcagtaactgcagcgatgagcctatcaggcaacacatacttggcatttctaacttcagtgagcccccagactgctgttcgagcaactttccactgacacgcatagtccgccaaacaagacagcaggatggaataacagatccaccacctcttcctacccccgcagctagtccggatcctgaagcaaagcgcggctcttatcggttcctccccacacctgaaaaacgaagtagagcggactacacggggctagacgcaccgtctcatagaaaggaaaggaagaacaaagtcaaggcgaaagataagactactctcaaagcaatggcgcaagggatgaatgatgccgcactacctctaggaggcatgccaaccgattcttcgtcaaccgataaagcgaacacagcgatgaacttacccccggctggggcacccttgaccgactcacacaaccatcaaggcggaaaagcgccgcaaagtatcgtcgagaacatacttgtcaactgtatcaaacttaacgatccacttggaagatacggacaccgttcaaagcaggcaattatgacaacgaaggttgaggcgattcagagttttgtggatgacattgtcaagttgcaataccccgatgcagtccagctaatcaagcaggagaatgcattctcagcaagcaatagtatccaatctcgatttaacgagaccgtgtattgggaaatcatcaaaaaaggcgccgaactccttgatccaaaggatttaccaacatccaaaggccctcttgatgaattcacgatggccgagaaggtcgccaccgagcgcttcatgaaggaagcgggttatggacttagccttgctaatcaacggcagtgccgtcttttttggaaacgactgttcgagatgcggaacgcgggtgttgacaaaattctcttgtatcgcacaaaggaatttgaccgcttctgcaaaagctactcatcagaatctggggcttctttggtagagatggtccggaactgggaagaaaggtatgccttccatatcaaacagttggaagagcgtgtggctgaggagagcaagggcgatttcacaggaagactatggctgagccagccgcttgtagcggacagacttagtgttcctgaaaatgcgtggaacagcgctatcaacccatggtcctccagcgtagaggaaaccgtcttccgattgagcggatcacacgagccatcagctgttgcgcttggtgggttctttgacttgcagccaaaggcagaaacaatgcagaacaagtctattttcgttactcttcaacccaaaggtgatgtctttctcgcggtttgccccctcatttcagtccaggaaggagatacccttgggatatttgctggagtgattcggtactcttcggaatgcggcgttgtctacggtatacctggtcccgaagaaaacctttggctggactacttcacggtgactggggtactaaacctcatgaagatatcagctcctggaggtgacttcaatgttcgtcttcagtgggagctcatcgacggacggagtgaagggcatctcatgtggaaggtctcggtcattgctcttcgggcaattcaaccatttgaagaaattgttcgcgctgctcctcaaaaagcacaatatctcctgcaccagtcgccaacttgcgcaaagcgcggttatacgaaaagccgaagttcctgattcttgttttttatttatatccagtgtctagttgagcgtattctaaaacgccattcaccagtgtcatccgtcatgatagagcaaaagtatatgtatttagcggccgtcgtagtcgtactggttggcatggagggtatctaaaatttggactgctaaggacactttgcgtaagctcagatgtaagacttttaaatgtcccaaggctgagttgcactgacgagtcaacagatagcaggggtgagaaggggcatattttgtgagaggggtaaacatgcattgtcccggtcgatgttacacagcccatctggcagtccaaacaggttccgcccgtcaggcaagcaaatctttgtatctatcaagagccatctctcaaacagaccagttatcagatacaagcactttggaaccaccaccactgacaactacaactattattatccttactttcggggaacatgctgtaaaatgagcaggaaaagagaaggagaaggggattgagaatacatgaaccaaggcccatgaaatgatttgaccaggctggtgcatgggccctgccaagttggatcagatgcgaagaacaacggctattatgacgcattgacaacgcatagttgcacttcgacagggtagccatgacttggcagattgaatatttgcttttttttgcgctcgtgagacgattctgaaccatagccaactaggctgagtgcgaattcggctcgattcccgtactgcaccggcctttttgcggttagtgttacctagaacggagacgtgtcatgtgcggggcaagtttgccaaacccactttaacaaaagatctgcttttcgtattttggcagaaaaataaaatggtgaacacaattccatgattcttggcataatttgccaggtccgatctgctccctacatagtcttcaatcttactgaaaggtgtatgacagaaaaatcccggagccgatacactacgctttgactagccgcaaagataatgaggatttactcccttttggacagcatctaatataattttcgctgagaactattttgtactagtcggccgaatggacatgatatcagctgttgttggtcttccgaggcaggagatgacctgcaactgaaggtagttagttacatgcagtcgctttgggcaacaaggtgtagtcttaaatgccgccgacgccaggaaactaaatgaaagccatctagttgtttaagaagggcggctctttcactttgactgcaatcttcccgaggaagaaaatttcatttgaaacgctatggaaactacaccctccgacaatgatatatcgcgggaaaccatgctacgaattcagcaggatttcctttctgcaattatatctgtgacaaggaaaagaaagatgaaggtgattgggaacatcagaaggctcaaaaagtatttggaaaaccaatatcttgatttcaatttccagattgatggggtctcacctttagcgcaagcaacagtgaaatttggagttctcgaaaagcttctgcaggtggaaagagtcgatttgaatttccgcacttgcgacggtcggacgagtctttattccgctatcatgttgccacagaccgattcaatgaatctattgatgagcaagggggccgagcttgagccgaaggataatcacggtcgcactcctctatctctcgctgcagagcttggacgaatagaccatttgaaacttctcgtggaatccaacgtcaatatcaattcaacagatgagagaggttggtccccattattttgggcgatatcaagcaagcaaaatcacgttgtggaatatttgctatcaaggagaggcattgctgtcggtgagaaagatgtggacggccgaacaccatttgttatcgctgcacaggcggagaatgctgaaagcttaaggcttctcaccaatgtcgcagccacgaccaaggaatacttcaatattgaaggtagtcctttggcatgggccattctccagaaagatatcaccactgttcgaatttgtctacaagcagattgcagacttggaattcgtcaaatttcaggcagaaccccattatcgatagcaacagaggttggaagtagcgacattgcgaggcttctcattgaaacaggagcagatccaaatgcggctgatgagactacatggccaatcctgaaacacttatcatttgaaggctatatgccttctgatagttttctgcgatacgttgactgttccatttccaacgccagcccaaattccacgggagaaaagccattactcctcgctacagaaactgagaatatcggagtcataaaactgttgcttgagacaggcgcagatgtgaacacgtgtgacacggcggggctgacagctctcacctgggcagtcaagcgaaaacttgagcctgcggttcggcttttgcttgcatacccagagactgaggttgattgccgagataaacatggccgaacgccattttcaatggccgctcaattgggcgatgtacatatcttgaaagagattgctcaaaggagccccgacatgaatacagaggatgaaaaccagcggacgccactcatattggctacaaagaacaagcatgaaagcgctgctgagtttttgctcaatttaccagaaactagaattgatcatcaggatgatcaaggtcgaacagccttttccttcgcagcggagaatgagctggtggagactatgcaaatgcttcttgagaaacaagcagatccacacattgttgattcgcacggctgcacaagcttctggcggtttcttaatgcaaggaagcaatggcttgactctctagaaaatgcgaagtttgccgaggtcaatccatttcgcctccaagccttggttcgctccctaccgacgcccaacaagcaagacccgtccggccgtaattggttttcatgggctgcttcatatggggatgaagaaattgtggagtatttcttgctggatgatggaaaggtggacgtcaatattcgggacaacacccaagaaaccttttctaaaacgccgctaatctgggcgctcgaaaatgaaggcaaagccatgacagagctgcttaaatcgagggaccatctttcaatgcatacaataatcgaagaattgcattcaccgaggaaaggccattcggagaacggagaccgaaaaaagaaattgttcaccctgatcaaagcactcgcaaatacgggctacaatctcgatcagcccgattcgaatgggagaacaccattgcatcttgcttgtctttatgaggatgaagaagtggtgcttactcttgttagtaaggcagatcaaaacagcaaggaccataacgcaaagattcctctacaatatgctttggcggcgagaaacatgaaaattgtaaatttgctgctggacgcgcgaggagccgaaatcagttctattagctcacaggaatggttcaatctgagagctgaaaggccttcttgggttcagatcacaaaaaggatgcaaagagaaggctttgatttggaactcgtcgataatcctcaatgcgattggttacctcgagccagagagtctagactttggtgagccattatatttgaacaaagtattgggtctactgacaagtgcagcctttgcaggacagattcaacatggtcacgattccttttacactttgggattcatgatattatgatggaccacaacacttatcttaaacattcccatagtgaatttggccaccgatcttttacgtatatatgggtgaatttccccattgaagaggaggatgagagtgccagggtccggtgcccgtggggcattgcttggatcagcaataagacaacagaaggccttgctgatggatttatcagcacattaccaagcgcatgcataccgcaaaatcctgctgactttgtggggcagttcctcacatgtctgtaccatgaatggaagaacttatgcaccgatgcaagcaaaagagttgaggatttggtgagtggatagaccgttatatgctatttttccaacgaccaatagactcacccatatgaaccacagcgaggcgaccaggtcaggaaaaaaggacggagcttcaatctcgttaatcggcttgccaagaattcacagtctcgtgcacgccttcggcaatgtttgcaatcgcacgttgagcaactcagagatatggtcaatatcgatccctcgtttaacttggaacaaaaatcgagaattttagccgccatcgacgacctcgcacaggttgtaaccacgaagcttgaccatttagagcaggctatcagagagcttttacagatcgtatgcttgcagcccagaatcctaatacagaaaattaaactaagtaaacaggaacttgcttgggtttcaacaaacgagtcagcgagcttcaagcgcctcagttggattaccgtgagtgcagcatacttattttggggaccatgtcagttaacaaacactgctttaccagtttgtttttctacccctgatgtttgtatcggtaagtcgtgctactcaactaggatttgccgtgcttggaattttggctaatgtcatggccagagtctttttgggatgaatgtggacttgctacaaaacaaccctgactggaaatggtacttattattcggggggttgtccctcatcttgaccgggactttgtggatggcttctaaattctttccagtcagtaatgccactgttctaaattgctagcgcagaatgctaattatcatggcgtagatacctcttcaaaagcaaacatctcgggcgccaagaaaacactcacacaagaacggggcgtcgtcgaaagtcacttcgagcatgtgctagaaaattgaagttcaagatcaagacctggagaagtgctttacgggtgatgcttcaccaaactggccaattcagtctggagaagcaatgatacaaaatatacgttctggagacaaaagcgcccaacttcatttccgccgactcctcgcaaaatctgtattggtaacatactagttatttatttgctacaaaaagggcatggcagcggcttgaacttaagttcgcgacaaagactattagagtgagccacgttggatataggtccttactgttctcatgatgatacgtttgcagattatttatatttgaacaagaaactctgagcagagtacagagaaacgctaaccgctttcagctcatcatgtcccacatcagtccctctcattcacagtcgataacaaagctagaccgtcatggcttttcgccatgaaatcactcaaagaaagatttcggaaacctctattgctctatgtcctcaaacgaaccggcaagcgactaaaacaatcattcatggacttgaaaatgagcggcgccacaaggcgattcgggaaattagttaagccgaagtctggctggcgtgatgtgattggcttctctcgcaccatcgttcagaatgccactagtctaaatcaggttactagagcaacgaatatgtttttgggggcctatgatgaacttgcatatcgctttgcgaggagtcaatgtaaatgaatactactactactactactaatactactactactatgataaacttgatggttgatgcagcaacagccattaaacaaatgccatacaatcagattgaaacaagcataagcaagttatataagcaaataatccctgatctctgttcgttacttgcttcacaatcaccaatgatagtaaggtaaaactccgcggacgagcacaaggatcactttctcagccgaatcatgaaggccatggctatctttcgtctaaaaaagaggcaccatttggtcgctaattgttatgagcgatggacttccgcctggagcgggttgatgacctccgggggacgactaagctagttgacatttgactagcttcatactctgctgctatgcacagcttctgcgaacttctcaactgggtcatccgagttaacgggtcacgattgccatcttttaccagcaagatgcatgggaatacggtcagaatgttcttatctcgagcaacctggttttggcaatttgggactgcgttatctcccgggaagggaaaaggctcccaatcgtcatcttcaagatcgactagatcaaactctgtctcgtatcgctgctgagcgcgttggactggaagccaaaagtcagccgcttttagcgcaatcctctctatactcgcgcggatcgaatcatgctgagtttccgagagcaatttccacagatatgaagacatattgcggaccaccgtctgaactcttgcttggagaagactctcttcggcattgagactgagcgagagaagaatacgtcggtaaaaactttccttctcggtatcgttctcggcgaggtgactgaggattccgtaaatttcagaatcttcaggtaaaatgtaattaggctggaagatatttttgcaaatttccctcgaaagaatagccagggttatggtaggcgcatccctttagcttcgggagagtttgagggtgccacggggacatattgctgagaaattctagcattctcttttcgaagcttctcccagatagatatgtcctttaggacaaacaaatgagcggacaagtcgtgaaaggggctagatatacacataccttcaagattttttctacaagatcctccttcaagacggtagttatctcgcttagagcaaagatccaaagatctgaaaagttcgtcgaactgggtgaaatatattagcgtacgaatgtctccaaatgcccacacgtaacttacatcgtgctttcatcaagctccaattgaggaacagtgaagctttcgaggtttcggagttgtccttggctcgtttgtaattctttgttcagtgtagctttctcggcttttaactcttccattttatgctgcgttgataaaagcattgttttgagacttgatccagcagtcttcattttgtcaatgatcttgtacatactagtactgtaaatcttcactctacactccaactatcccagctcacagtagaatcggacttgctccaacgaggcgaccatattccgggctacacgtagctgcacatgggtgcaagaaatatgcgcgcaatcactcgcgtacattgagcctatagggtcaagaacacgttgcattctagccctactttcgcatgcataaactagcatcacttctattgcgcttacaataatggggctcatgaacctcccctcgtacatttgtagagcacccgttcacgtgtagttctcgatcgcaatctctagatggaatccaaacatctataaaatggctgtgtggtatctcttcgcggctctttagaaacttataaatacatcagactctcttgtcggaccaaaattcgttttatgtattggcaaacctgtgaatattcatagcccaacaaagtcttttcatcatgtcttcttctagcgttcaaagccattcaagcgcaagccagtatgtcgcaccttcgacctttaacagcgatagccttcagagctttcttaagaaagtcagtgcactggcgtcaagccctgagtcccaagctgcgtcggctatgattgaagaattcggtcatcagcgtgaacaagtccatgctagaaatgaggagctaaagaaagcccaaaatgagatcctcgatctgaaggagagaaagcgagtcgccattgaggagatgtttgcggccaacgagagcgaaaaggcgaagcaaaaagaagctcttgatcaagtcgactgcgaaaccgctgagacgcctcggcgaagtccaatacggcctggaccgtcttcgcccttgaaacggtgtctggtttacctttctcaccttcgttggagcctcccagcagactcgacacgctgttcagcgcgtctccaaccttccctctcaattccgccctcagccctcggagtttcgggcactccattaatacgtggctgactgtctcctgcgccccgcactcgcaccggtcgtcatcgctgtatccaatcttcttccgatagctggatagccagttgtggcccgtgcgtagctgcgtcagcagatatgcgcgattcctcggtaaattcccgtagagcttccgcgtgtactgcgccggtagatcgccgtcaatttttcgcaggtgggcacctttggtacttgtcttccactcttgcccccattggtcgtaaattttgctacggacgaatgcgttctccctcgatagaagcggtcggaaggggtgagttttacccggctccgcggcttccttcgcgcgacgatctgcagcgtcgttccctgcgttttcacaatgccccggcatccactggaggcgaagtgtgatattctttgcttgaacctcggtggctgtttgcagaattgcatggacaattcgttgccccgatctattttttgcgttctggattgcttgcaaagctgatctgctatcacacaagattgttgccgttatgtgcgctccatttacgacgttggtacgttgatggaccagcttatacaccatattgaccgcatagaagatgccaatgagctctgcaacgtggaccgaccaacgttccatcggccccacctggatctgttgagattccaccacctcatcattgtcgtcgagtgcgacaacagcagcccccaggtggccctcgcggccggaggcgtccgagtagacaacaatgtctgacgtgtcctttgcggactctgccctgtctctcgctctttcccggtcgggttcaagctcaatctccacgaaggcgtcctttcgccacggcggcaacggtcgtgggtcgatcgtctctagttcgttgagcctgtcgacgtccatggtcttcaacgcttccgctagggggaagcgcgcgtacgatcctatgttgtttctacgattctgggcgcgtggtaatgcgctccaaatggggtggtcacgcggtagagtatgtagtctcgcgatggtgcgctgcgcgcggtgacgaaggcgaagatgcgtaggaagtatatgagcttccacctctaacgttgcggtggctactgtccggaaggccgatagaatgcggatcaacgcggttctctgtactgtgttgaggtgtcgcaggtgggtcttgtcccggagcgggtcatgccagactgtcgatgcgtagtctatgataggtgtgacgcatgcctggtagagctgtctcatttgttctgggcgcaagtgtcgtagtccacttaaggcgatagtggccttggtggcgcgtttgatggcctgctgaacatgttccttccagcgaagcccctgatcgaacgtcacccctagcaatttcgctgtgggtgacggtttgacgacagctccattgaaggtcaccccttccgggtgttctcctctctttcgggtgaggtggatgagctcggttttctccgccgcgaagcaggaccccgttcgttgcgcccactcttcgatacgcggaatatcctcagcctgtattttggctacattttcctcggctgaccggcccactcgccatcggaagtagtcgtcaatgaatgccgacgcgcctccgtgggagtcgacgggctggtcgaccagatcggcgttaaagaaagcaaacaggatgggagacagtggcgagccttgcgctagacctgcattcactagcagctctgtctcggtacggaaatcgtcgaatccaatgttggcgtgccggtcactcatgaagctcgcgatccattttcttgccaccactgggatccctctcgcctgtaaagaggcatctaggctcaccctgtttaccccgttgaaggcgcccttgaggtcgaatgcgattaaagttaccaccttgtgcttgtaccatgcttggtcgatcgcattcgacagcaccagcaatgcttgctcggtggttctgcccgggcgtcccccgaactggctgctcggtagcaagccatgcttctctgcaagataagataaccgtcgggccatcacggcctcgaggagcttcccgagcgtgttcaaaagtgagattgggcggtaagcaccgggcatcgcgtaatctggcttgcccggtttccgtaagacaataattttcgcgctccgccatggttttgggtggtgtcctaggtctatacacgctctgaagatgctagtgatgaagggcttcaaatatacccatagctttttccagacccgcatcggcagattgtcctcccctggcgcagtggttcctttcgctgttttcagggatcgctctatctcgagtgtggtgatcgggtgccacggaagttctggttgtggcgacgctggtaggctgggatcggatgtgttcattgcgggaaagaacgcttcaagaaaggcccttgctttgtctttgttctgggtgagctcttgtgagcccaccttcagagccggggtgcacccccacgtttctcgaggcttcatgtaggtcgcagctttccagagcttcccatcgcccgcctcatctaagaactgtttccaatgtgacgctttagccttttcgattgttcgagtccatgctcggcgcttagattgcatggtctgaaaggcagcagtggtgctagcgtggtctcgtccaagctctgcacagctcgcctgccatcttctgcgcagttgattgacttcgacttgttgcaccttgagatatggtgtgaaccaccgcttggagtatggggctgggcgagtgtcgggcgtgaactggtcgactgcctgggctgtcgctgatgtgagcttctccaccacccggtcgagtgttggccgggtcttgatatccttccaggggctcatcttccgagccacctcctcgccgattctggcccagtccgcgcgctcatacgcctttcttactttgtcgtttggcttgctctggggttgaagatcccattccgagtacgtggcacggtggtcggacccatagttctcgtgatacagatggcacttgacaagccgttccggtttgtctgtcactgttagatcgatggtcgagttttggcctggattgttcaaggcccagtaagtcgctgtccctcgggggaggcagctgtggaggttgtggctttggagaaactcgatcaggtccccggcctgctcgatgaatctgggtgggatgtggttgccgccccacagtgggtgatgtcggttgaagtctccggatagaatgatgttcgtcggccgctgctcattgtgcagcgtggtcgtgatggtgttttgtattgctgtaagggctggtagtgctgactcatcgtcgcccatgaaaagcggtgctggaggtatgtagaccgacaggagaaggatttgggagtcggctgaccagatcttgatggctgcgacatctgggtggtcgcaaggtatctggcggtgtgaggaggtggaaagtcgtctattgacgtagatcaggctgcggaatcgaactgcgtcggtttgcgtagtaggtcgataaagtcgccaagcgctgtggttgacatgcgtgcggtatgtggtaatggatggctcctggatcaaaagtgcatccagatcttggctctgagggtcattgatcagtgcctccattctcggtcctgatttcattatgttcaactgtaggactcgaaggttcctttctagcatcttgtggggttgaaggtcgccggagctgggcactgtcgatagcccgtagggtgttcaccactacagtcgaggcatctggccctcactccgggtgggcagcgctcccgttcgtgttggcccgcacagtgtccgcatcgtggcatttctttgcacgtccatgccagatggccaaaccgttggcatcggaagcatctctttctcttgatttcccgtcgctccacctggtgaataaagttcccactaacaaggaacccctcccgaagcatatggtccgctccttctgcggagtcgaaccaaatgcccagagaagcaaatttccctagggtcttgtcttttgctttcatccaggccagctcttcgatgcgaaagccgtgttccgctagatcgttgtcttcgataattttttctaccgcctgagtggccccggtttccaggtcaaattcctcggtgggggttcggtgtacgacgaccccaaaccgtggttttaccagctttgtgttgttgcccaattgatgtagccactcggtgttgctgcgggccgcctcagtcgactccgtgttcttgaatcgaatgatatagccagttttggtagtgccgaccccggccacttggacgtcttgcgttgcggcttcgctctgcaatgcggtgcgaatgtggttgttggcggcatcgatggggaggtatcgcccgaaggcgtttccatcattgtcattactgtctcttgggtccacaaaggtcctttgagtgctgattcgaatgcaattttgctctttctcgggtttagggtggttcagcggggaggtgtcattgccgccgctagctgcgactgtggcccaggtcctggtcgccgtcgctggtggggtgttttccacttgtgctcgcaacgctttcacctcctcgtgaagcttttcgttctgttcctgaagaacattctggttgtgtttgatctcctgcagttcatcttgggtagctacgatggccgcggtttggcggcggatgatgtctttcagcgtgccgatgagtttccacacctccttggtggtgattcgagcagcggggtccgcaggtgcgaagacatcgccactccgggttcgcttccggctctcagagagcaagccggggctgtcagcagccgccgtagcctgcagttcttcccctggtatgctggtgatcgtttcttgggtgtttgtgggaaagggctcgggccctcccgtcggtgggtccgacatcgctttggggatggttcccgctcggtacacgacgttaaagttaaaccgctggttggatacagggccccttctatgccttgaagtacagtgcgccaactagatacagcaatattcgcttcagtacaggatcgctcggtacaggatcgagtggttcccgcaaagatcaggagtgtacagggtagtagtagtagtagtagtagtagtagtagtagtagtagtagtaggattcatttaccctgtcccctcgcgaacgatatgcaggatacaacaactatatatcatgaatgaagtacatgtagagtggtccactttctgactgaatcttagagcctcgtcacggcctaccctggcccattgccgctcccgctgttaggctgcccctgtggcgtacgactgcgaaaccgctgtgnnnnnnnnnnnnnnnnnnnnnnnnnnnnnnnnnnnnnnnnnnnnnnnnnnnnnnnnnnnnnnnnnnnnnnnnnnnnnnnnnnnnnnnnnnnnnnnnnnnnnnnnnnnnnnnnnnnnnnnnnnnnnnnnnnnnnnnnnnnnnnnnnnnnnnnnnnnnnnnnnnnnnnnnnnnnnnnnnnnnnnnnnnnnnnnnnnnnnnnnnnnnnnnnnnnnnnnnnnnnnnnnnnnnnnnnnnncgagtatgtacatgtagagtggtccactttctgactgaatcttagagcctcgtcacggcctgccctggcctattgccgctcccgctgttaggctgcccttgtggcgcacgactgcgaaacctctgtgacgcctcggcgaagtccaatacggcctcaaccgtcttcgccctcgagacggtgtctggattacctctctcaccttcagttgagcctcccagcagactcgacacgctgttcaacgcgtccccaaccctactccttaaaatcatccgcaaagctcgtagttttagacattccagcaacacatggctgaccgtctcctgcgcgccgtactcgcatcgatcatcgtcccggaagccaaatttcttggcgtacgtggataaccagttgtggcccgtgcgcagctaagtgagcaggtatactcggttcctgggcaagcttccgtacattttcctggtgtacctcgctggtagcgcgctgtccaccttccgtagatacgctcctttggtgcttgagttctactcctgctcctactgagcgtgaatcttgccgcggagaaaggcgttctctctcgttagcagcggccggaaaggatgggttttgcctggttgcgccgcttctttggcgagtcgatccgcggcctcgttcccggcgatttcacagtgtcctggcatctactgaagacggagggaaatatgccctgcttgaacctcggtggctgcttggaggattgcatggatgattcgttgccctgatctatttcttacgttctggattgcttgcaatgcggatctgctgtcgcagaggattgttgctgttgcttgcctttggtttctaaagattgcgcgttggtgagccagtttgaatatcatgctaaccgcgtagaagatccctattagttccgctatatgaaccgactaccgttctatcgaccccacttgcacctgttgcgaatctgttacctgatcattgtcgttgagggtgacgatggcggctcctagatgaccctcgcgcccggaggcgtccgagtagacgactatgtctgatgtgtcctttgcggacgccgccctttctctcgctgtgtctcggtcgggttccagctcaatctctgcgaaggcttcctttcgccacggtggtagcgggtgtgggtcaatgatttctagcttattgagcctgtcgatgtccatggttttcagcgcttctgctaacgggaagcgagcatacgatccgatattgtttctacggttctgggctctgaataacgcactccaaatgggatgatcgcggggtagagtgtgcagtctcgcgatcgtccgctacgcgcggtggcgaaggcgaaggtgtgtgggaagtatataggcttctacctctagggtcgcggttgctaccgtcctgaacgccgacaggattctgatcagcacgtttctctgaactgtgttcaagtgtcggatgtgaactttgtctctaagcgggtcatgctagaccgtcgatgcgtagtctactataggtgcgatacatgcctggtagagctgtcgtatctgctcagggcgcaagtgtcgtagtctacttaaggcgattgccgttttggtggcgcgcttgataacctgctggacatgctccttccagcgaagtcgttggtcgaataccacccctagtaatttggctgtaggcgatggcttgacgtcggtcccatcgaagatgatttgtccttctctgtgttctcccttctttcgggtgaggtggataagctcggtcttctccgctgcgaagcaggatccagttcgccgcgcccactcttcgatacgagggacatcttcagactgtatcttggacaaattttctggtactgaaccccccactctccatcggaagtagtcgtcaatgaatgccgacgcacctccctgggagtcgacgggctggtcgactaggtcggcgttgaagaatgcaaacaaaatgggggaaagtggtgatccttgagctagcccagcgttcaccagcggagcagtctcagtgcggaagtcgtcaaatccaatgttggcgtgccggtcgcttatgaagcttgcgatccattttctggccaccagcgggatccgtcttgcctgcagcgacgcatccaggcttgtcttatttactccgttgaaggcgcctttaaggtcgaaggcaattagggtcaccaccttgtgcttgtaccaggctttgtcaatcgcactggacagcactagcagggcttgctcggtggtcctacccggtcgtccgccgaactggctgtttggtagcaggccgtgtttctccgccagaaaggataaccgtcgggccatcactgcctccaggagtttgccaagtgtgttcaaaagtgagattgggcgataagcaccaggggccgagtaatccggcttgcctggtttccgtaagacgatgatcttcgcgctcctccactgtctcgggtggtgtcctagctctatacacactgcgaagatgctcacaataatggcctttagatgcttccaaagcttcttccagaccagcatcggtaagtgatcttccccgggtgcagtattccctttagctgctttcagtgatcgctcgatctccacttcagtaatcggatgccactgaagttccgtctccgttgcgctgggtgggctgatttcgggtgtattcatggtggggaagaacgcatccatgaatgccctcgctttgtctttattttgagtgcaatcctccgagcccactcgcagtgctgggatataaccctatgtctctcggggcttcatgtatgtcgcggccttccagagcttccctttaccagcttcgtctaggaactgcttccagtgcgaggacttggctttctcgatggtcctcgtccacgctcgtcgtttctgctgcatagcttcgaaggcagccgtggtgttagcgtgctctcttcccagctcggcgcagtttgcctgccacctcctacgcagttggttgacttcgacttgttgggtcttaagatctggcgtgaaccatcgcttggagtatggcgtcgggcgtgtgtcgggtgtgaaccggtcgaccgcctgggccgtcaccgctgtaaggttttccactacccggtcgagtgttggccgggtcttgatctgcttccatgggttcatctgtcggactacttcctcgccgatcctagtccagtccgcgcgctcatacgccttccttgctttggtgtttggcctgctccggagttgaaggttccattctggataggtggcacggtggtcggatccatagttttcgtgatacagatagcatttgatgagcaagtccgggttatctgtcaccgtctggtcaatggtcgagttctgtctagagttgttgaatgcccagtaagtcgccgtccctcgagggagacaactgtggaggttgtgggcttggaagaaatcgatcaggtcgctggcgtcttcaatgaatctaggagcgatatagttgttgccccacattggatcggctattgcagtgagcaccggcattgctgacgcgtcatcgaccgtaaagagcggtactggaggtatgtagacagaaaagaaaagagtttgagaagcggccgtccagatcttgatggctacgacatctgggtggttgcagggaatttgaaggtgtgaggaggtggagatccgtctgtttacgtagatgagactgcggaaccgaactgcatcgtcaatggaattcgaaatcagttttaactttaaactcttacaatttaattccctgaccctaagtggagacacgctaatctaattttagctcttccccggttgatccatgtagggctgtatgtattcactggtaaccacaatgggtcattgttatagtaatcgtgactaagcattcacctaggtgagccaaggcctaaacacaaaccaaggcctagacacaaaaacttcatgctttcaatttcagacctatttttcagctatcatactatctatatttacatatttaaagaactcatcatctacatcgagataatctctacctcctgatgcctcttctttttctttaagagcttggttggcccgaagccagtagtctcgaatccttgcatgcgcactctcgttgccaatgtccaattttgtttccttcgtacagcgtcgatgaaccctcgaattgcctgcaattgacgataatggggacttagaagcaccctttataacacgctttgattttttgacaggaattttgtggctttgcatctttttgatcgtctgctttgcaagggctaggtcttggatagcctgcttgccgccacgaattgcacggtttatatgcttttgaaccttcggaaggtctggctcgtcgttttcgaatatcgtttgaagcttattctcaatttttgagaacctttgatccgagttcggcggcgaattggtgactgagctaggaatttccgcctctggcgaaggtgtatgaccatagatctcaagcactggttcatcttcccagccaggatcaatttaatcacagacaatatttggattccaaggccaaataccagtatcatagaatgatgatttaatagttcgtgatttaaatgtgtctttgcgaactgttttgattaaccgaagaaaatgccgtttatcatcaacatctccaccccatcgtacgatctcattattcttctttcggaatttctgtttaaggaccgagaatggcttgccatcgagaggctggcatcgatgtgtcaatttcggtataaaccaccaaggtataatattaagggattggcaaaggtattcgaattccggggttccatgagagccatggttatccataaccaaaaccctaggtctacctttggtaactcgctttttggtggtataatggaaatccaatagccattgaatcgcagttttatcgtccgtccagcctttagcagttggtttaataaccctataattggaagggtcattatcgccgtcgaaccaatcttccatttgttcagaaccacacattaaagatcatagatgtataacccagccatcggctgaaatgcattcaataccagtgatattctggcctattccaccggtcgcaatagtctcattttcacgggtagaagcgacgttttccttagttccaacgcctagctgaaagccagtttcatcccagttatatagttcgtgggcctgaattttgttctttttaaggaattggccaaagaccttataccaatgaactaattcaccgtgtaattcggcctcgattctcgctttttccataggcttttgtgtacggagagtgatatacggtggtaggcgcgcgataaattggtagccatacattttactaacctgccggtcggaaccgcagtgctgtaaaatgcgatttgcagcgccctcaatatctaaagcagtcggtggtgtatatactgaattaagcagctcaatgcagcgaatcagggatctctcttgcgactgatttagtgctttgttggtggctgtacggccttttttactaggcgtgccgttacttcgattccgaagcttccactttgagatgccaaaatgagaggctgcggcctgaatactcttgaattggcctaatttataggcatcgacggcatctgagagaagaatctcttctttttcggacgaaattggcatagttttggtggtaaaaagtaaggacaaaaattgaaggttgaagtttttgtgtttaggcattggtttgtgtttaggccttggctcacctacacgcgggacgggtgtaggtgaatgcttagtcacgattaccgtaatttctttagaaaccgatggaatccatcgtgcaaacatatcaaacaaaaagagaatctggcaaaatcttctttcattctctcatgtcttggtctatttgtcacgcgcagccttctctttcgcatctaaaagaaggctgtaatgacgccagagagaaatcatcctggtacgcaacttgtttctctacagctttggcctctgttatccactgcgattctcattcgttaccaagtcctaaggaaatccgtcacttggggaagttgacatggaccctcccaggactgccatcgtactgtagagatgacacagagcccatattaatcttgttcaaaagtcgcgatttaattgttttaagacgtctatctccctgtgccgttcatcatagaatgaaaagtactccggtactgcgcgacgtggcgaagagtaattcgtgtcaatgttgtcggcagtatgagaaccatgtattggtcagattcccgcgctcgtgttagatggtgattggcagctattaacgtggctgggtctcgaccgtttcgaccaagcctaggagaacagcacgcacatttgagatgtgttcgatggggatagggtggagatgatcctgcactcttacatctggtcatcaagtcagcagtataagactttcggccattgaagatttatctccgtgctttctcagtaggatattcaaagagatacttcacaagctgcatttttacaatgtctggtaagtatgtcatctggccgcagccgatgtatttgggcgtattattaacttccatagcttccgaaacgtcacctgataggcgtccagacccagaatctttaggcaggtgcaccgttgcagagattttaggaagtccatctctcgaggcctccctcaaaagactcgatcttaagaccggccggggtcccgaatttgtggataccgaagctaaggttgcgagtctggttgggaaactgcaagacttacctaccaacccgccgtctctttatattgatcttgaaggggtcaatctctcaagacacggtagcatttcggtccttcaaatctacgttcttccgcttgacgaaacctatctggtcgatatatacactctcaaggagaaggctttcttgcagccggcttctaacaatgaccagaccctactaggtatattggaatcaccatgtatctctaaggtcttcttcgatgtccgaaacgactcagatgcactatttaatcatttcaatgtcaaacttgccggggttattgatcttcaattgatggaattggcaacccggtattactcgaagaaatacgtcagcggactggcaaaatgcatcgatagggatgctcctctcacgactgatgaaatgcgaacttggaaggcatcaaaggaaaaagggctgaagctcttcgctccagagcgtgggggcagctatgatgtgttcaacgtccgccctcttccagatgatatcaaggaatattgtgtgcaagacgttcaattcctacctaagctatgggtccagtaccaggggaagatatcgtcgtcttggaccaaaagggttatgacggagagcgctaatagagtaatgctctctcaaacagccacatacgacggaaagggaaaagataaagctctagcgcctgtaggctggtggtgattctgcgattgctgctatggtctttcctactatttggtcggacaagtttggctacatccattctagttttagcggagtctgcttgattgaaaggtacaaattgcacacgaatacgtttttcgtcaaagcgaaaagggcagcaggagatggcgcgcccaaagaaacgctgagcaactatacatagaaccgggctctcaagtctgcgggataagagattcatgcaccttggctggtccgttctctgccgagtagcatttattggttgccggggaaacagggcaacgaggagtgcgtagtgacgtcaagtactggaaatcggctgagttgtaagagcagggtgaaaaaattatcgctggtagacttggggggtggcagggtataaggaaatgcacggacatcagagcaagtggagacaaataatactcgaacaaagaaaacattcaccaagaacttatttcacgtttgacatgcgcataaaggacaaggaccgtaaacactaacactgccgtcaacagctcttgacttcctatttactcaacgtttatcgagttcgtcgtgtgcaatggtcaacacacgtccaggatcaaccaatccacccgagttccacgatgacatttcttgaagggcatccgtttcctccctctactatggcgagagctcaaacacgttgaattggcctctcaaggccatcgaaaatgagcggcctctcaattcttcaatgccgctgcacttaactgcgtttgcccgccttgttccggtttaacccagctagctgtttttctgattaaactacgatatgctgagttagggagctagattcaatcattgctcctaggatcatgctcacggcctctgggagctaaatgtcctccaggaactgtacctgtcactcctgggagcgagacagatcgttcctgggctctccaccttggatcctggagccactcccgtccgttcacagggagcgttgattacttctgggagcaattgttccgctgcccgaaattattgcccgctttttagatcccgcttattatctcacaagtgagactcacattcctatatcatatctggccgcaagatccatagtatggttcctaggtacgctcatggtcgctcctagggattagattcatacttcctaggggatctacagctcccgggagtggataatagcttcggggaactagagtgggttccctgggctttaacgtttagcacgatcggtgccgtgggattagtggggtcacccacacttttccatctggtcctggccccctgagtacgattcccgggatcacgagagctccccggaattaacaaatgattcccagaggtagggcattaggaatctaggaatacaaatctagatactaggagcaactagggctaggaataattcgtgtctttccaggaacttgcatagagaaggtgacttgcgtagggacacactggagagtagggacacactggagagtagggacacactggagagtagggacacaccggagagtaaggacacactggaaaaatccgggtggggcaatgagcgcgacactaaaatttgtgtcgcgcctgctgaagagcacaggcgacacagaaagcgacacgtcatatgaactggctcttcgtaccacttctcttctagtccaataatcctatgcctagataagtattgagataatccaaaggcgatcaagctcttctggcagggcattccatttttggactagtgttactctgaactccggaaacagagacgctaagtgtttcacgttacatagttcgtcgacgaatgataagattgttgacaaacagacagcaatcaaaacagactagctatagtatatagaaattataggggagactaaactcacaggatttcaatctcgtgaagagcgtagtcagaaggttttgagccactacagtcactgggctgtcgcggccgtcagtcaatggacctggagcccagctagacctaaagctgtggacgtacgtccagcttggactcaaatccacagcccgaagtacttggccccagatcggctgctctgggcccttgtctatggaaccacagccctcccactatagctcctcggcattggacgtgcgtcactggaccactggcttgcccagatagtggccccaaaaccgcagtcattgttcctaaggctatggcctatagtcctaggtggctcacgagccacggaccatgggccagctgggctcagtatctatcaaccggcgacttggttggattactaacctggatggcctggtatcgagtactaatatgttatactaaatacctctggccaatagtcggccacctctagccactttgtcccgggttactttaagtttctgcccgaggttcatagatattgtcgcccttcctctctttatcgggtctagctcagacggacctgatctagtatacattcaaaacacacctgacgctccctgatttagaaactttttggtttctttattctcagtctgttgattaccactctcccgaaatccagggccttctcaacggcttcttggtgaatacagtgaaagaactggcgtgtttattgaaactattggccaaacagcagccccacaccacgcccatttcctaatacccaggcaacccccaagtctactacaggaatcatttcagcctgtttcagtgatatacatgaagcatacaggatgtttggagatatgatctgcgggacccacatggtgcatatcggttcccctggacgcgaggaagctatctttcttttgcttccacgcgctacgtcttgtatctagagtcgactacagctttatttaatattgattactgatctgaatacgctgtccccatctacggatacgttcagcattatggaatccgacgcgagtccagtgtgtagtaaggacagccaactactcgaggctagagagcagtgctagaactacgccaccgtaatttatggactatcaaatgctgtaacttcttgattggacgccgttcgggtgctctcttcccctctgttctcgactaagcactaacgttctggcacgccagctcacttatgagttggcagttagtaccctatgccggctacccagggactggccctcccctctcccaagctgcttttgaggtataaatccaaactcttaatcccgttttcttttcttggctgacttaaaaccaaaaccctcgcatatcagttcttcacaacaacttaattcagccatgaccccacaaacattttactatgcggtttataaaggtcgtgttgacaagcctgctatatatacttcttggtaaatgagatcaaatccggaaaagtggcgcttttttcgctgatgttctatctgtctaggagccaagcgcatccaagagtgacagaatgcgaaggcgctgatcatgaaaagttgaaaacactcgaggccgcctgcaatggaatgttccaaagaggaatcaaagatttcgatatgcccattaaaaattccgccaaacgagataccatgccaatgaatgtaggcaaacattgggctgtagctggtggcagggctactggcattttcaccgactggaagtaagtttcattcctttcgtatgcaaagtcaatacctaattagaataggagtgcagaaaaagccatcaaaggaacaaaagcctgccatgaggcttttagctcccaagaagaagcagaagattttattgcaagttggaaagatgccttcgctgacgtatcgcgactggccatcagacaagcattagagaatagatggaagcctcgtaatatgaagtttaatgttgagtcatttttaattagagacaatgagaatatgatggggaaaaacgacaaagagatcaagttgtgtgggattgaaaaagaggaaaacctttttaaactttgaaaagttggctatcaaagaagaacataggatatgaagcttcgtctactggaccctggatctacaatcaatctattgatacgttctgaattgcacccgaatatacaaaccaatgctctctgaagtttgtaaaagtttgcatcatatcacgattccgcacctatacaagtctcttgtttttaccacccgggagttgtcactgtcaagcctgtgcatgcagatagagtctgtcgaatgggacctgagatacacgcgggaactaggatttcgagctccagttcatcaccggagggcaagccgttgtgttcactttgacgatggaatgggtgaacttcctacaaattccacaacactatgtcggaaaagcgaaagcagacgtctgagtcaaggtgtaaagcctcgctattgttcgctcttgggtggggtcgtggacgagacattgggcgcggaccgctccgtcgtcagcttaaagcctcggccataacgatctttgaattccgataaaggtttatcttccaagccttcatcttgccctgctgaaggcgagcccctatgatcggtgttcgcaaaattcaccctggtcatattctttgacaactgttgaagcggtgcatcactaagatggcccccaacttgccttgtcctccatcccagcccacgatttctgccatgaattattttctcattggtagagaccataaattgaatggcgtcgccagtggcataattatcgatcgtactagcattttcgtccaaatgggtcccagccttcgagcagatatgcatgcattgacgagttgtctcccactcttcttgtaacctgagcagttttgcaatgtcctcctgagaggctgttaaggttgatgtcagtgagcgaatgggtttgaagcagcaaaggctttgttctttaattcagagccacggagcagaatccctgtgatgcatagaactgaattttatgactacatgatgcaatactgtacaccgttgacgagtacagtacgtctcactcttcgattattcctcgaaccttgatgccaatatccactggactatattaagagtaaaactaggacgtaggaaaatcattaatatacaacacctttacctggtagattgagtgtgcaagggtggttccagtcatcgattaagctagtcaatcgatctcgagatgactccagtgcctgctcgaagaagcgcaatcgagacagttgcttgtcgtggcgaagctgaagaccttccctctgtgctctcagctgcataccagtctgcttcaaaagaacgttatcccgctctagcttctcgccatcaatgtgcttggacacgcatgactcccagaggcgttgatagagtccaacgagtcgagctagaaaggctaacttgggatcgtcgcgttcgaggtttgctagcaccttcgaaatggcctgaaagggctcagtcgccaaggtaggtcttctttctgtttcctgctgtgaaggggggaactgcgatagtcagcaagaatacttcaagccgaatcttttcacctaccaatggagggacctggcaagaagtttccggcgagttgtttttatcgtttaagattggcaattcactgggcccctgaacaccttccatttcctggtctcgcgagttattcggggcatccattctgcctaggggagaatgtcaaagatctgggcaatgccacctctacgaattctccatgtgtcttatagactagcagacgcaggtggttctggcctgggtttaccggtcaccacattagtcaaccaacgaagtcagcatgtgaatttttattattatttccagcacgcgattggtaattgggagtcaatttgatagaggcagactgatcaacgagtcgcccggggagatttgatcaagcttcacgatgttgagggtatccgaacgcttattgaggaaatatctaatctatttcaaagatacctccactttcgttgaaagtctcaggaaattgataaacaaaacattgtagaattgacagccatcaaaggaaactatgaccccaatatgtcttgatggtcacaagttcaaagaatcgaaggtatggccaagcttcaacgggttgacgggccgagcaccggcacacccgaccgtgacctcgctttccgcggtcgagacagctcaacaccaacacaacacgaaatcgaggctagggaaaaaaattcatagtttcaagtgacgaaattgtaggcgcttttcggtgagttgacattccgtttctcgataacgtgaacagaataagaaatacgagcctgttaatacggattgaatatcgtccagaaatcattagtacaagactgccgtgaaggattcaacaatcagtcaacgtttcttggccggcttagcatccctttttccgaaaaccactcttactcgtctctctcgctgagcgtctaaaagcatcaaagatgccgctgcaaatacttgcagtaaaagaagacataggctttgattggccttacgctttctaccaataagagcacttacgcaataggatgagccgagaaggctataagtacgtcttctgtccatggaattttgatctatcgtcgattcacttgactctgcaaaatcgagcaggcttatgtctgaggtatctgataattcctcacactttgactcagtataaaagttcgtattgtactaacatttataggatatatcgtgtaccagcaagtcagacggtatctgtgagcgatgatttctagcagataatttgccaaccagccagccgatcaacgagacaagacaaagcaggctggtcaacggtctatgagcagccgactgagctgatctacagtagctcttctgtgtatccccaagataaaagctcaaatattcacgtcccaggtaagtaattttgagcccgacctatcggaaattcttcttatcctacaaacaatgcgatttgaatagaaccgaggacattcaaccacaatgtacgagcgcaagaaccacggttctttgccgtctcttcatccctggacccgagcaccagaatatgtgagtgatgaattatctacaaactaataaattgcagcgagccattggtaccagtatgacccccgaggatacaacacccgtgttattgctctgcactaaccatggtctacacccccgtcctggtcccgtcgctatcaatcgagcaggacacctaggcaaggtttatagaaatcaaaggagcgggccaataacaggatacgaacattttattgcgagtttcgcgttatagaagcttgagacgtctattctgccggtaaggtaagtgatttatcgtgccttttactgggccatatctatttatttgtgcaaacttttatggtgccaaacacgaatccaattactgattttcggtatatataggagcagcctatcatcgtccgtaaacatccttggggtcctattgccctcgatcctactgccttcataccataaacggcggagtggataaacctctttctggccgttagcatcgcgaggtcttctctcatcacaaatgcacagtttcctgttacatgggggcttgccacgcgcctttggcgtctcagaagttgcccggtgcccccagtacaggtttatcgaagcggtaaccggagagtgcgatgcacatgaatccaacacggcataaattgtgactgcattgccggggagggctatatgctctagtcggtaggccgataggatcacaaggctaattgatgtcccattcgtaagcgtacactctacggagcttataaacaggtaagtcgtgacaactcgtccaagtgattcaagccttgctaactcagatcgtataaccgaggcacaggcaaaccaataagagagcccactacccaagaatcacctcggatatctccaagctgtataatgagggatttaaatagtatcatggtgtatcctgctggatagatggttggtagatttgactcttaggtgcgcattttctatcccaaccgaagcaatatgtgcagagaccattgaccctagctgtcactgcagcaggctagttacgttgaccgcgtttatattttgtctattgatatcgtcttctaaacatatcacgcctaagcaactgtggctaggaaagcgctggattctctacgtcccctctctcgagtattcactcatacaaaacagatcatgaagataatttgtaggtcttcgcttcttctagtactgtcaaatactcaaattctctccccgtttcaaacactctctgctccattccttcatatggtactgatttgtagcagtacctcacggcgtcatcttcacagtcccctcgtatcgtccgattgaactttcagatcgctgcaacaaaatgtatcagaatcaagatcactactgcagctccaaaggcggcttggccaacagctccatagtacatgacgacgtagtacggaaacgaaccatctctgtcaagaagttcaaatgaggattggagaccgtgaatgccacctgcaacacagcctcctattgtcacaacaggcaagctcaggagaaatgacatacagccatagtagactcgagccttgcaatcttcctgtatccatcgggggtggaccaaaataagtataccaaaaatggaaagcattgctgagataagggccgtgataaccatggtaatgagagtgtcgctcataagcttctggagtgtgatgtccagcatgaaatagttggcgttggcgaggtcagattttgcgcggttttgcaggacgtccgcgaagtgtgctaacgctgagctgagagtggcaagtcccagccaggtgacagtaaggaaagaaacgatcagtcgtatccggaccacgccattagtgaaaatagaaggcattgttcacagaaacggtatctctgatttcaaaaaagtgatttggggcttgtgctggcaagttcttgaataatgagagaatggaagcaaaaaataaagtggtcaatatctccggacacaggcaatctatttatactttccagtatatacagtgctctgtgcatacgaagcttgtctattcaataaaagacatagtcgatcctcagctgtatcaagcgccctttgcattgtccgctgcctaagtggcaatctgcataggtttctccgagatatacgttctgcgacttacattgctatcccttcttggccggtcgctttgcgaacggttttcagcctctcaaataaaacaaagctcctaggaccgcccgtgaattctgtcagggatatacgtgaagcatgtaggtaaaatagagatatgatctgtatgacgagatagtatacgtaattatagagcagcctacggcaccgggtattgccactctttcttttccttctataccaagtaacctcttctctgaagacgaagtcgtgttatcccacgagactttggtccatcattatggatatttcagccctgccccgacaaatgccaattttttacaattgggccggaagcgactcgactaatatagcgtatataattctcagattcatacaaagtacaagaatatactttttatatgcctctccacgcgtacaaagccaagtaccacagtattcctacttagaatgggttgctcaccaatataggcaacccctagggcgggcaatcacgagccgagtccgaatatctcggatgctatctctatcgctgttatattccaggctacagtattcaagattcatctttcgttttgtcttgccacttgcacatttctagttggcgtcaaatatgaaagcatggttgggagggtggctaccagacgtgaggcctgttgatatctctggattataattctactggcttcaacaaagtgggttattgtaaagaaacgttgatagaccggaggacccaatttcggctcaacgtccacacttccaaacaccaatagatgatatgaggttcggtcaagttggcgtaattaaaaagcagtttcttcgtagacggggtcgccagatagcgcgaaaaggccgggaaaatacgtactgtatggttagagaagacatacagaatatctccttcaacaaccgttcagttcgggaattttttgttgttcaacagttatcaaatggggaggccgataatgaccgcgacaacgtttagttgtcacaacggtcaccacagaatgaaaatcgcacatttttcttcgggcttctctttaatggtcactcggatttcacgtcattggtgagcagagggtgctacgaacaatagacagattgaccaaagaaatgaattggtggtcacaagctcgatgttgaaagtggatgttcaacgaggtctctaacatctgtcgggccattgaattgcgtttgtgccacctttataaagacgttgaagtagccctttggatctggctagcatataagagagactgtcctgtaagaagtatattgttagaaccctgaatctttgcaaacggataggatggatgccccaaatgaactaccgggccaagatagagcagaccgtcagccaagtgaaatgcctatccgaagtgatgaggcctactcaggagctatttccgattccgaaacccaaatggtaagctacgtgcaataatacgttctatactttggctgaccaccgcattccttcgcaatagcaggaagcaggcccgaagaaacccttgacgatcgagtactttcaacctatattggagacactagccgatcttgatcgccacgatccaaaactcgcctttcaagcggctcgagctgtgggactctatcgacgtgtatgggcttcgtgtgagcccagtggccacggtggtgagaaagtagatcagaaaagagggattttgggggaagcccctatcaaattaggcaacgagcaagacggtctccaacttcgtcctaatgagcagctatgttttctggattcctttgaacgggctctggagcaaactcaagaacgactagtcagcgtgctcaaggaatggaatcaagtcttgagaagtgatctggccgtaatgatagataccgacagatacgcctgagaggctgccagcggaggagtgtcatgtcgacttcagagctattgaatatatcactggaaacaggaaccctggaaataaaacagctcgtatttaactataaaataagctaaatgggtgtgttttccccggtatggctgcctctttggccaacacatcggcggtgtcgttccggggcatttcacaatgtccaggtatccactgtagtcgaatcgacgtgccgtgtgtcttgattataccggcttctttccctataccaaagaagtggagcgccaatggtgaattgatcgatgtaacctatatagaagtgccctacgcgttcgcgttcgtgggtctcaaagcgtaacgcgaggttcaataaaatactgcactgggtcaatttgtggttcgaatcatttcaacaccaagggccaagcggtcttcaccgagccccgccgatccgactcgcaatttcggaggccaaagaggtatgaggtagaatgcgatctactcaagatactcacaacatttacatacattcaacaatacggatccatccaattggtaacggtgaaactgcaaaactttctgtccaggtagcggctccaggagccagctggcggatcctgggagcagggcgcctattctgagtaccttgcgtatacgtagatgaagagtgcttcaatactgaagaacgctatactcaactctcagtacagaacgtaggggcttcctcacattcagggaatcccagatgcgccatatgggtccacccatcgttgatcctcaactcattttgcctcatgtatagctgactcggtgaaacttaacccagcttttgtgttagtgatttctataaatgaagtgttctcgcccatgtcttgcacagtataaggcagcatcgtcgtatccaaaatccaattatcgccagagcaagtccaaaaagagattgcattatctcgttactaggtatcttcgaatcttacagcacagagacccagctcggaactccaactaatgcttttttgccatagaagatgtctcctgattacgatgttgcctttgagccatggaccatattttcggctgcgtcagtgaagcagtgttgcttagcctttgcagaggtgatcaagggactgccgcaaaatcaagtggcaaaggtcaacttcaacttccgcggcatttgcaatttacatagcactcgggcagcgaaggaaggagagaatgtatttgtgctgatttcggggaaggaggtagttttgaaggatgcgtttattgtcaacatatgcgcattgagccgggcattagtcatttacaaggcggcggcgcaggccgatcattttcgctcaagggtatcggtcgaaaagtgggtatcggtcgaaaagtgggtaccggccggatttccagctgcggtagatcgactcgatgatttttttgaggatgtcaacaatcttcattgtgacagagaggcgctgtataatggggtcgtgaacattcttatgggtttgccttgactcatttattgcttgatggcatcgtctcagttccaaactacctcacactgtcccacaatgattgctttgattcaatttgatttgttcctcgcgcttttcgcagccttgccctcagctttgtgcgctgtaaacttcggtacatacaccgcattggtggatcccataatacgacagtgttgtcagacggcagtattcgcaaacacagatggtcaacggtggtgatctcagacagtggtgcgctagtcgacaattgtaaaagtcctttacgtgtactctcgtattgctactcctgagagccagtgtcgattaatttgacccttggaaacagaaaggggagtttacctttccaaaatgaaggctgccattccagtccacaatattcaaagcccgcgacgtaccctcttgtcgttctatgccacgtatcgcgcatacagctcggaggaaatcgccggttctctacgttccctgccttgaccgtccgttcagaatcaatcaataatcatcaatcacaccgcactgcggaggataaaggtggccttggtatccgagacaatatcggacccgtatgattgtgggacgtcttggactagctcgtacatcctgcactgaatctcccccgtcagtcaacgctcatgggatggctgctgccgaaaggatggttggagtcatgcctgctgcgaccaagcgaactagcactcgcgaggatatcaccccacgaaaggtcgttctaagcgatgataatatagatttctctatccggtctgataccagatacctgatagccctttctggaccccagtcagacctcaaccgtgatcccttaccaacagaacatggttgattgcatgaactcgggtacgcctcacagaaagcaacggccgccgttatgatggtggtagtggacgttgatttaaggaggattggtggggatagggtttatacttactgaggtatcggagaagaagccgatcaggtattcttaattgcatgcttgttcaaggtcttggtgatagggtggtccgtgtggtcagactactttgactcgcgacatgctcttgagaaataagcattctaatgtagggtaggttcaagtaatgcttgaagtcatgactttgactgtgtgagtcacaaggcctactgtaccgcattgctagtctaactcaagcgaactagaaatgactgatgcaattatgtcggtgcaaattgatgtgtggatgagatggcaaaactccgcgcacgcgcgggcgggcccgcttacaaagaagcacttcggccgcttggacttttcatactacttgggcttacagctgatcgattgttggaatgggaccgctaatttagcgtgaaggaaaatatattaatccgtgtcaatccgcttttcgaccatctatctactcagagcggtcttggcaaatgtcgagatctctctttaaactaggatatcttcatagcttataatagacgttcataaagaccctgtaaccatcatgtatagtcttatctttatggaataattagttattgggtcggaagctgttatgctgggttcaaaagaatcccggcattcgctgatgtctgacattcactgatctctcggaattcggattaatatattcctccgtgccaagaggcgctacaaattggcggtcccatttcaacattcgatcagcttgccgatactacttttgaattttttaaccacgtaaatgtcagagaatgacatatattcaaatgatttgactaaaattatatataatgaatatattcggcttaagtggaaatcaataagggagaatttataaattgaattgtgattcaagatacatgaaagcagttaatcctcgcgcatcaagtgtatatatataatcgcaaaacttattgaacctacgaattctcacacaatatactgtctacctatcgaatggatagaactattacggaaatgacatatccaatacactatatagaaggatacaccttcattctaatcaattacctaccacattagtggttattgctggcagatgacagttgatgacgacgtaattaaccggatagatttccaaagttgaacgccctgtttaagaaacttacataattcgatggattccgattcccgccgtgaggtattctccttcaccgaccactcacgcactcaccacagcactcaccacagcactcaccacagcactcaccacagcactcatcacagcactcaatacagcactcaccacagcactcaccacagcactcaccacaacagcgtatctcaacactcaccacaacactcaccacaacactcaccacaacactcaccacactcaccacactcaccacactcaccacactcaccacactcaccacactactcaccacaacgctcaccgtaacacttatatccctggctactctataccttaatggctgataccgcaatcaatggcggcggaggaactccatcggatcataaaacaccacagcacaaggaaggggaatacagcacccgatgaggaagaactttcagttgtcaatgctacgatcttgatgattgaatttgcgagatctatccaaattccattagatctttctaatgataatttcttcggaaaacgagactgtaaattgctagaggccttgttctaatatagccccaaacccgggacgattgtgattccttcggcggagactggatggacagccatatgaagattgcagctaccaagcctcatgatctggcttctcgtcgatcgtcactcccctcgcgagagtatggcgctactgtcacactctgatgttaccaggcctctctgtttctggtccatagaatgttctagaagctggggatctcccgcatccacttttccaatcgatatattcttttcgaacccgacgcttcctctctgcatctgctctaccccgatcactagtccgataaccccagtaaatagctcttaagaatctatctcaacttcggacgcaccatatgggctaaccgaaatatagtctgccgattttgcactagaagccgggaaactgattggctcccgagattgtagctcaaatcctaattattctggacgatcgcgtccccttaccgaccgagggtttccgtggttcatcgaaactcgttttttaagatggtggggttcaatagcggatcgacagccccggtcttcattcgacggtcgttatagaccaagatttattggtcctaccattcttgtgttcgcgcttcacaactagggcgtggatcggaactcaatgtgtcagcccctgtacgatagatcactctgcttccaacacacgtatccacttaaatccatctagatccttagaaatctagcatattttctcgagctgataagagtctcgagcatcttaaagagccccggaccaccatgtcatgatctcatttctaggacagcactacgatcctcaacccattactttgaatacccctcagtgctgtttcaatcccaagaaagtgtgattgttcatattccagaagaatatgtatgaagctgtacatacaaccaggaccaatccctcatgctacgcctttattgctgagctgttgaaccccgcccctcgtaatcacataaatcaagctagtttattggaataggttgacaatctgctttaaatcaccgtaacctgtatgccactagaatgctgctcgcattttgtccactggtatctcagcttcctggctgcacagacacgatgtacatagtcccaattacaggatgacgatcgtgttcctggaggccggtaataaaccggtactagtgtcatgcgacctgcaacaaggtctcagcttgccatgagcgaagaatatataatgggtatttcatacctggtctggagcttttcgtttgagttgattcactgccgcgggtatggctaggctcaaccgttgggaccgtttgaagccatttatcaacgcttccttgggcagtatttgtgtctggaagagactctagtgaagccatatcacccaccgagcgatgaatggctcctgatcgttttctgttgcctcgatgttctggagatccggcactagtgcgacggcgcttccgcagaatatggtacttcttccctcgtagagattcaacggttcggactacccggtattgttcataatacgcgtgggaacgggctttccacgagagcgcccgatgggcatccagccaggggagaagatttttctcctcccattctggccagcccattgcgctacgtggggacattatgggggtcggaaaagtggtagtagtggtaagaaacgggtgaacacaacagcagaatgcgaacttgcagatacaggtctgttgggagtatccaatattaagtcaactatgaaacctcccaccgttacatcggaaaataaccattgcgtgattatgagccatggctcagcctggtgggctggtcttggactctcatctcactattcgcactgatcatgtttctagagaccgacaagccctcaattgttgaagtatcgttggatggtggcccctgagaatcaacgacgttgaaatgacaacagcaatgggagaccctctttgtgaacgatttcaccattgtattgaaaatatactcgttgagactgtccttccgttgaagttttttttttacaaatgatgatccttccgttcatgatctagagccgctgatattctattttgactagcaatatgggaaatcaggggcgaaatataatggcctcaacggtgaaagctctgatcatctggcgagtgattttttgaggttcgaatgtggaaaatagacctgacaaattctaattataggcaacaaatcatttcaatttcaacgatacaactctataaatacttgcgcctttcccccattgtattgaattagattcaggttcactcttgcctcagtgtgactcggccgcaggtatgaagggaattcgaaaagtcccgtacactgatcgaggaaattttcggagccgattgcaacgtgcattatcgttgtcttcctccgactctgaggacactcgcagtccgtcaaggtccgtggcaggcgataccacagaggatgagccttctttcccggaggaaaacgactacggcggcgatcaggaaaacagcaacccagctgagccagaaatggtgagcatggacaaaacggatttagaggatcctggacagattctgttctctggggatagcaacacagttgctctcgaatgtgtggcggagtaagtatagacctcatcacagaacatgactatgtgatttgcctgctgacaatttctagactcaatacccgattgaagtcagttgcgattcacccccgagtgagaacaagaagcgctgatcgtctatataggtccattgagagctcctcgtatgatcaaagcacctggaatcaaaccgttcgtgacgatttggctggcatctttgctcgattggcgatcgtggagactaatattgggaaggtgcttgaagagcgtccaaaaaaagttacagtggaccagaagagcgggcggtcgcttcgtcgccagcaatgattcgaatgaagctgtacttatttattccattatgttcaccagagcaacatactgtaccttttcttcaatactttctacacccccaggcaatctgaaacctggaaatcccaggataatataaaggcctctgtgactctcattttacttacctacacacgacaccaaatcaatcgggtatggaatactggacacgggacacagcacataagaaatctttgaacttcaagctgctacaagtcgtctgaagataaggaaattgcgtttctccatgggccactatatttagacgagggaatacacctttctcctcagttcaagtattgcaggtcatctgcatggttagtccaccaggctcccacttggatctgcgcaatcaaaaacattcccaagaaatatcaatctagagtataagaaaatgacgaaggagcttgaagcaagtgggcttctacagaagatgacggaaattgacagtattcacagttcggaactattacccttagtatagcataacgataatattgcgtaagtacctttccatgaacaatttgcgcgttggctacattgaaacacattttatccgcataaaatacaggccaggaatttcaacgcagattctttttagaaaagagattgatcttgattggccgcaaacggctcctggtgactagggagcgggccattcgattcggagaggccgaggtgtacttcgtggctctcagtagtgaggccccgctgctccggccagtctgcgtgaattacaccggagcctggcaaataggatgccagtcgtctgttttggagggcatcgattgtattccaaaatcgagtggtcattgctaccatgtccccgtgtgcctgatccaacactagctggatatcattccacgggatcaagtcttgcagagcggtatttgtggactccagctgctgctgcaacttacagatctcttgcccaacccgctgactatcagctaatgcctcgttccttactgtgatagctagctgcaatttggaagtttcttcggccttctccgcttcaagttgttccagcaactgacaatgcttgtgtctctccccgtccctctcctcctgtgctttttgaatctcttcctcaatgctgctcaccatccgaagacattttctatgggtctctttatcatgttttggtcgaggcctttttgtgatgggggatacctagcattgtgagtagagagtacatcaagacatgccgccagggtagtgctggacatggcaagttcagaggatatagacagaaggtagcgatcgggtaccggatgcttgcgcaacccaatcgcatgtttgagagggttccgatcatctttggacccagagatagcagaccgatgggaattacacaaaggtgcagtagcacgatactgtccttcgtccgacctatggcctgtctttctctgagaaggcttggtctttgccatgcttggcatgtaagatcctctaatggacaatggcccaaaggggatggaaagggtgaaataaatataggtagtgactatcgagaagctgatattatataggaatacggacaggcccaggcccaagacttgaagctacggttttactcctgcccaacagctgtgccagaattaggaacagaaaatcaaaatgttgagtactgggcatgagcgcgaacgcgcagaaaccctactacgttattatgaagtatgtgagcaagaggtaagcacaatcatgtacgttgatgcaaacaacgctatctcgtgatagaatggtttaatcggcctgatgtaccaccaaaaagaccaacggctcaatattattatcaaaaaaaaaaaaattgtgagtgttgcccacgttaacgactctgtaaattgagcctaagaaatggcggcgttctttcacaaatgtcccaattccggaattcatgtccgcagatatatggatctttaagaagcagttacttgaggtgagatctgattgacaagtattattgatcattgcgcccttgtcactggcgcaactataaagaaatttcgtactagtatgagtatttatcaagtgtcccaccgatatagatataactaagggacaagaatccccaatgctgccgatcaaacgacaagtccggtacagacccgaaataccataaaagtgcgatgggaactcgaagatatgtcacgagataatcatagacctcttttcatatttgataggcgatcaggggtgtagctacgaggctagtgaagttgatggaatataagtcgtatgtgaatcgagatagcagagcatcgaacgctgaccggtgatcattttacttggcttttcgaggagaaagcgcaatgtctgatctagaaattgacaggtccaattttatcattgactagaaatttccaatataacatggtgatcacaatttataacgtaagtcactgaagccaccggtgcatactatagttatcctgataatctacaacgttattggcctcggcatatattgcgttcgtcaagcacccggcttgagactcctattactcattcgctggcagcccctttcgtaatctattagaacatcttcattgctacaagatcggtaacattttgaatctagatgagtctcgtatcaagatgtagcgcgtactacgggaggcatgcacgcaatgcggctcgcagcgcatttccgtgatctatcgcgttctctctagtccagctcagacctcgctcgctaccgcatctgaggattggctgtcgcgggtatcacatgtgatctccaatccttcagcatgtaacgacctcaatgtcagtattgctccggcgatgccgctagctcgtcaagcaggttcttattttgcgagctaagagtttgtatttcgtggcggagttcatttaactagtgcccgaccctgagttccggcggaataacaaatatccgaagagcatgtgactctagatgtcgaaactcacttccagactacaattagttccgatgagactaactgatagaaaccatatatatggcaagcgcactgatgaagtcacaatggtaaaattctctagctaatcaaaaacaacaacgatctagttttgacaatctggtcagacataatcaggaatcaaatgcataatacacaagtcacatatttcatcggtaaaaagaaagtatcattatcatcctgtttcttgacactatctctgaaatatacatatagcttcacatcgcaaaataccaacagctcacttttgtatccttatgtctcgttacgggatatatataatgcaagcaaaattccccagtccagaagcataagagcatatgctgccaccagtaggacctcaatcaagcttgatttctcagcatcactttggcggtgaaggtgggacgcccggcttcttgacgcctgtagtatcgtatacgccgcgtctataaagctcagcttagcttagtcggaaatcccagtcatagaaccaacttaggacgaatcatagctggcccctgcgcttttcaagcgagatgtaaggattgatctctctatagacgaaaccaagttagcttagatgtaaagatagagctcgcggatctgtatacccgagtccgattatgaagcaatgggaggctgtagagtgcacataaaataagaataaaccaattcacagggagcattataaaagctagccctatggtatccatatagtaaaagctagggagacggcggatgaaaagatttcttttctatagtgatctcttatatgacctatatatgacttcgccgaattagtcgcgatattccaggggctatgttcttcagtgaacgcacacgcatgttgttgcaaaagagactattgccacgatgaagcttcggtaccaggccgaccagttcatcgggttgtcgggatcattggactcccaagtgatctcaaagcttggggcccgcgtggtaagacgagatacagcatgttcaacgtcctcgaagccatctaggtcgtccatcatcaaagtgcaaagggtgcgttaaagacgacttgtggtggggtttctattattataagaaaaactccatttcttttttttgtggtttttatcttatttcatttaattttgccagagctcaggacagtctggatgcgtcggcctggtgctagctaccggtaaccgccatgcccgagcggcaagagccaaatccgatgacccaccgggcaaatccttctccgcggccattataccgttatcgatacaatcctaagatattcggtgcgcatatcgttgcataaaaacgctcggacgttgtcttaactgagtttgttgacatacagccaaaattccgtgaagttcgtccacgtgatacggaggttcacttggcattccgtatccacccgcatgctccttgatatcaatcaacctttcaacgattttccggtccacatctcctgatcaacatattatacttaccaaatgcgtaaattgagttgtgttgtattcaataatatataatctcagcttcatatcttcaataaccccggggcagaaggctaatcgcctagtgcttgagagacatgccgtcttggcggatgagccgtgtcgacgtctcgggatatatggcactgcatttgttgggtgctgcttcatcctatcatatagagtaggttccaccgaatttctgtccataagcaaatccaattctagaagatgttgtggaggtcatcttggaataatggcttacctcatatctccgatcttatacgcgtcaagttttaaaacggggagtcccaattattgcaggcaagatgatatatctccagtgtctactacttcatacataatatcgaaagcatacatattgaaacctcatcttgaataaattgaaccgctctccagggtccgcgaagactaatgaacggccaagggatcgacagaagtacaattgactaaccgaggtttccgccataattccgttcggacagaaactgaacgctcaatatgtcggtatcgctgaggtcttagttgacctgcgcttgtatccatagagaagactgaacagaagtgatcagcgcggaagggagtctgattggaactagtgtcgcaaactgagtgtcaccacatggacggaggtttgatcagcggtaggttctacaggcctcgccaatcgcaggcctttgtcgagtttcgcggtcaagaacacgttcttgggctcttggcgggagcccgattcggaacagagtgtgatgagctccacagctcacctcagggataaaagcaaggctcattcgtctctggaataatgcactcagtgcgaaaacacggacgcagaaaaccgcagtactacgcaatgcctcttaccaaggggaaaacagctttcgtgacgggtgtgaacgggatcagtggccatgctatagtggagcatctgataagagaacctgaaactgagtggtgagagctgtccacatcctgcaattggtttcattccagtctgactggcctcccaaggtcccaaatcatcatttcttctcggcggccgttggcaactcactggatcgatcctcgtgtggtgtttgtggccatcgatctcctcgaccctactgagaatatcaaacaatctctgtcgacactggtggagaatgtcacgcatgccttctttacatcctatgtccacacagctaacttcgatactctgcgcgagaaaaatatccctctattcgccaatttcatcgatgctctcgatgagctgtgtccgaggcttgaacgtgtctgcctgcaaacaggtgggaaggtgagacccttcacagcactgatacagtcctgtatgacacctaactatctatatagaattatggcgttcatcttgggcctgttaaataccccctagtagaagatggccctcgttacacggacaagaacaatttctacttccaccaggaggactacatgttcgacgtgcaaaagaagagaaaatcatgggattacaacattattcgtccgaatggaatctttgggttcacacctcatggtgagtggatttaccacgtttcctgttggaccatcttgaccaaagctttgaattaggttctggcatgtccgaagtattgtcactggcgatctatttcttggtgtgccgggagctgcaagaaccggctcgtttctgtggcaatgagttcctgtggaccaacgttgacaacaaatcatctgcatggggcctggcacacatgtctgtgtgggctgtgacgcaggttcaatgcaagaatgaggcattcaactatgtcaatggggatgttttcgtttggaaaaatctgtgggctgatcttgctggctatttcgaagcagatgtgaggccctcctacggaatggatcccccaatattgatttccgagatacgctaactcatccaggcccctgaacctaaatttatgaatgctgctggagtttccgacaagttgacaaatgagttcgatatcctcgaatggtccaaggataagaggccggtctgggaaagagttgtagccaaatacggtggtaaggttgaggcatgggattggacctcttgggactctgtgatgtgggcaatgggtaggtcctggccaactatagcgtcgatgagcaaggcaaggagattcggatggactcgttacgacgattctcatgacaactattttcaaaccatcaggagcctggagaacgcagacattctgccaaaaataacgaagcggtgagcacctagttcagccagctaagatcgtcgtcccttttgttttctttctgaaaaggaccgtgtgattattgctggatttaagctgaatagaccaatgtagtgggtgcgtctcttaagtagacccggtcgcttcgtggtgggtagtcaagaaggtggtaaccggctatcttcaccgtagggctcttttcatccgactgcaggcgatttaggcagaagcggtagtgcaaaagccgcaagctctagtcaataacgagttccgtaccacatcattgctaggccggtacatagaactcagtcttaagagataccaaattgaagaatgtttccaagatggggcgaggtccacaatacccgcaggatcctcacgagctcagaagcgctcaagaatgttccgtattgtgaagatatgagatcatttctctctagcaatcaactcaatatcaaagatcccactcgggaaaacatgcgagataattgggacacgcaaaagatagtgaacagtcaggccagcactccaggtcttcctctactggtgaattgacgctaatggccaacgaggagtcaaaggtgtctttcaccggcgatcagtcagacaaaagtgacccggaatatagcaaacaggagtatgatgggctaataagcagctggaactgctcggtagccgatgactgatttgcttggccgtatcttttgcgaaggtttgttttggttcaacaagctctactactctaggcagtacggtcactgttcataagtcttgacaagcctctagctccgcctgtataccgctcatattaaacattgttcatggacttcaattataatatatatattgtattgttaagagcccggggtggggtggccccgtaatattggaaacttagtttatcacaaagccttcggatcttaagccctacctaatataatcagcagggtgtggagcctgaggggttcagacctttagagccaagtgtgagccaaaggtacagatactgttcaaaggcgggtgaggtccctccgtgaggaggttcgactattcaaacaccccccaccccaaaaccgaagccggtggtatgcctttcataaatcttaactacattcccttctgtgtgttaatcatggctccaaaaattactgttgtcttcgtatgtctgccattaacccctcgttctcgtgtttccctagattatctcctttgtagtactcgctccgcggccatatctagaagcttgctgaggctgaaaagcagggcattgagtccgccggcgggcaggctgacatctttcagatcgccgaaacactctccgaggagatactggccaagatgcatgccccgaccaagtcttcctaccctcttgctcggccgaacgatatcctgaagtacgatgctgtcctctttggtatccccactcgcttcggtaattttcctgtctagtggaagatcttctgggaccagactggctcgatctgggccaccggtggctgttggggcaagtacgctggtgtctttgtctccaccagtagtcctgggggtggtcaagaatccactgctctatcctcaatgaccaccctcgcccaccacggctttatattatgtccctctggactacaagcccgcaatttccctcctgaccaacctccagaaggtccacggtggtagcccctggggtgcaggtactttcgccggtcctggcggctttcgccaaccttctgctctcgagctatagattgccgagacccagtgcaagaatttcgacgaaaccgtcgccaaggccagttagttactgcatggcagagcccagtgggttcccacggttgaggctgtaatagttgatcattatgcgaaaaacaatccgggcagtctgtccagcaacagtatggcagctaagaaccagtgagatataagacgaacagcaaggcgccgtgcgctgttttcaagaaaggtgctgtcatgtggccgggaccacagcttacatgatttttttttgttggaacgcggtcgttacagcacggactagtacaagcagagccaattgagtacttgagagtgtgatctctacatactgtagaaagtgcagattaaatggggagttgagcttagtaaggtccttgagagccttagggtcatcaggcagatgggggcctgaatatttctcgggcgcactagttaagttacggtcctcgtttgtcgacagaaaatttcaaactattgactatattcgttactcgctattgcgtgttcgctttttgtgagtggaactgcagctctcatgtggctgatgcacttcccaaagctcagggggaactatccctggctgatcaataaagtctttctgtaagttagcaacccccacttgagagtagtcttccgcacgatccagtaaaacccagacccaacccccaccccccaaaagggctggggggcccaatgggggtnnnnnnnnnnnnnnnnnnnnnnnnnnnnnnnnnnnnnnnnnnnnnnnnnnnnnnnnnnnnnnnnnnnnnnnnnnnnnnnnnnnnnnnnnnnnnnnnnnnnnnnnnnnnnnnnnnnnnnnnnnnnnnnnnnnnnnnnnnnnnnnnnnnnnnnnnnnnnnnnnnnnnnnnnnnnnnnnnnnnnnnnnnnnnnnnnnnnnnnnnnnnnnnnnnnnnnnnnnnnnnnnnnnnnnnnnnnnnnnnnnnnnnnnnnnnnnnnnnnnnnnnnnnnnnnnnnnnnnnnnnnnnnnnnnnnnnnnnnnnnnnnnnnnnnnnnnnnnnnnnnnnnnncaacccagacccagtaatgggtctggggccccaaatggggttacaaactaaacaaacatgctcaggattccaattgtataacttacgcattttcttgtggtaattttaagtattcactttacttgattaaagcgaattttattgatgaaaagggtgaaagagaagcgttggttaagaattcctatatcaagctaatggtatccaaatatatcatcttcccggctcttacgattccgccctggtgctcgtgtctgtgtacaggttggggataatgatggtgagcaaagacggacatgttcacttgtaggcgaggaacccttctccggtgtatcttctggttcatcccccggttcatcctccggtcctctgtatcgctaattggattgacctcaatcttactaagcttctcctccctttcttcttttgccgccttaagctcacctggcgagattctcgagaagcttcacttcctgctcctctatatcaaatttcgtcgtacaaagaaacattattaacccctcaatcgtctctgttttcattctaccacgagggtagtgacagatacctcgagcagtatcaaagaggtgtttgattcccgcgccagttgccgggaatgagagtacatctcgcgcaagggcagcaatagctggaaagcgagcttcgtgctctttccagaaagtaagcggtctaatacaaatagtatctatctatgggttagtatcgttatagtatacaatctttatatttacttactgctatcaagatattaactgatttcattagtaatagctcgtggttgtatatcccttccatcaagtatctcttccagtcttgagcctggccgaactataatcggagagctttgtggatcatgaccactacttctaacttgcgcttgatatggaataagggcttgctcaaaagcaagccgataggtgtcttgctatttctgatcccaatcgctggagaggaagaatttgaatttgttcactggtgcaagcattgtactgattgcatagatattttctcgactatcatcagcttgagagtaatactcatcaaacttagtccgaccagcttcaagtgcttctaacatctgtttctcttatgggacgcgctttcggtgtagctgtgcctgtgatcgctcaagatgatcaaacagtttgttatagagcttaaaaatatagtgggcagcgacatctcgagtttttgatagctgtgttgtgtagtcaagaaaggctcagtgatatagagaagatagtcgatctgacgccactcttgctcgcttaagtagcatctcctcacaatcatactctgtacagaataaagagaaaatagcacgtagcctctttgcccggcgaagtataaagaatgtggaactccatcgtgtcttcacatcttggattggaacaatctttatatttgttgtctgaagattgtaaaatgtctctcggcgctggagacttgcattaacgtaaatcgcaagataccggactttgttcaatgtggaggagatctgacattgcttcgcattttcttgggctagccttgactgcttctccgtccactttgtctcggctgattcattcaatggaactgccttgatccgagtaagaagctgatttaggcagagctggataacatgtgcaagacatggtattcgggcaataataataatatcatctgacaaagcctgttggagagaagtagttaatgtcttgttgcttgatgcattatctgtcgttaacccgaatactctgtcttcgatgttatgctccgctagggtttctaacgtaattcacaagcgagccgccaccacctccaaaaacgcgtccatgaattagcacttagctagttcaaccacccaccatgccaccaatatgctctcaatcctctacaaattcagtagagcaagagggtaaaatcttactagctatccaggcttttcaaaatcaagaatttaccaatatttccaccactgcccgcatttttaacgtaccgcgttcaacacttcgggatcaccttagtggtacaaaacaccgcgcgacttctcgcgctaattcatctaaattgaccgcaattgaagaggaatctcttcaaaaatgaatactctctatggattctcgtagatcaaccccccgaccctctatgttacgagaaatggcagatcttctcaaacatcgccgaacgaccccggttatttcagttggtataattgggttacaaatttcgttaaacggcatcctatccttatatcccaattctcgagacgttgtaattacgagcgcgcgaaatatgaagatccaaaaatcattggagaatggtttaatcttgctcaaaaaaccattattcagtttggaattaacccggacgatatttataactttgatgagaccggatttgcaatgcgattaaccacgaccatgggctgcaccaaggtgaagtgggtgtggaaagacaggacataagataaataggtgtccagataaataatcctgtttagtttaatcaatttaatggcgttctggttgaaatatattcgttagaaaactatactcttgggtagggtggcggctcgcttacagtggcggctcgcttaccgattacgttactccggattaattgcttagataataccatagttaagccttggaagctcccgagtctggagaagtctccctaattaggcctagtcccaacttatactcgctaattctgctaattctattggcttgattcttataccgtcttttagaattctgccggtctaagtatgattacataatgcaaaatgaagccttacgtaaccaacaatgccaagacttagttacaaggcttgtagcttcttcgactgtccaattataccctggcgcttacttagcgggtacgtcggcccatacgggccagttgtgcaagtgaccctcggggtcgtaacagatagactgctcaataacagccaaattcatgaaggagtatgtctctacttgtcctttgaatacgcacctctctgattacagatcattggatcgccccaccgctggaacttgacttgtgatgcctgtcccctgagactcactagagaggattggatcctggctgggctgagctgcgacttcgcgctgaacttggtctatcaggtattgagtcgcaaaccgcaggcgctgcggaccacggggtttttgggctcgaagatatgtacatttgatacgagaattccggcaaccttggcatgggtgaccatcccggcatcggatcttcgagatttcagtataaaccgtatcctatattctaatgagagtagtgcgatcccatcacaatccttacctttcgaatcttacagccatcgcaggcggtcttagttgcgggtgatctggcagacatggtggcagagacgctatgcggggtacactatacgtcggtcttcggtgttttacaactgcagaacttcaaaagtcgcatgggattctgccggaacggaagctgttgattgctcaagtagattccattacaaagaacggtgtcatcaatcgattgcgtgactctccacggggcacgccatagggactagacccacctagtctggaccgtggcaaaatgttggcacgcgatgattcgtcgcattcttttgaactagggaaataagccaataatcgagtggataatgaatgagaagggtgtttcctgggaagactgctagaattgaattgaatcttagttgatcccgaggcacatttttatttcaactagccgacagtacgaccgttttaacactgcaaaacagccgataccgagcggttgtgaaagttgcgatgaatgcagaggtatatagattagtataatatgatttccgccccagatttcatcgaacttcggggttaatggcttccgttaccgcgagtactagaagccgctaccttcccgttgtacgtgaagaagtcgctggaataaggagcttttgaggccaacgaagcccatttaatcagaggtccaacctttttgactaacttcaaaatgccaatcgttggggtcatcgaaccaagattcaataaagactttgcctttaaaaatcatacaggaggaagcgcctaccccgaggcatttgtacactaaattgcggttacctattctcgatttcaggattataaaaatgctcgccgaggatagtattcattcctcgtaatagccttcgccgttgcggttaatcctaccgcgaaaccggtctcgtcgaagttataaacgtcgtccgggtcaattccaaattgaatgatttgtttttgaacaagattgagtcactatccttcaattcgaaatcgaccccgatgacgtttataacgtctcgagaatcgggataacagggtagagtgccattgtacaaaatgtaaccccatttattaccgaccgaaataaccggggtggttccacgttgttcgagaagaagattcgccatttcttgaacagtagaaggccgggggcagacccacgtagatccatagagagaatacatttttgaagagattcttcttaactctctgtcgatttatgcgagctggcgcgagaaatcgcgcggtttggaggccccgtagtcggttttgaagagtggaacgcggtatgttaaagcagcgcgctacctcacgaagtgaagaaaattcttgctttttcaaagcctgaatagccaacaagatcctaccctcttgctctgttacatttgcgggggattgggagcgaatcggtggcatggtaggtggttgaattgactaagtgctaattcatagacgcgcgttttgggtgggatggccggctggcctacatggccgattcgcttgccgattacgttaacgttaagagtagaggatggtcagccgataaatgatgtctattaaagatgcccattagatatgtctgcaaacatgcgtcacacttaaaattaccataaataacaagtaactccagattagacagcaagcaacaattgtttgttggggacctatttcaagagcacagacggatattggtagtccaaagatgctacatatgagctcaagctttggacttgaaacaccttatctcaaacattttcaatggcgcattgtgcaacttgagctatttcttgcaaaaactggtccaagggctgaacgtcaagaaggttatccggagttgaacgagggactgacaactctgcgaggagccgcgaaacagcgtgaaggaggttactgtcgtattgcgccaacggatgcttgggatgctcgagaatattgcaaaaaagtgtaattgaggcagtgaccggataaaacaaaacaagcctgcatgatgtagtcagcttttggtacaaatcacgttattacaaagatcaagttctccacgaaaaggaacggaagccagaccagagacagcttgggaactgaatcacatgacgcgcaatttgcaggtatcgcaaagaagatcggctagcctcggtggcaaggaatgtactggaactgataccgggactagtcgcattgagtgccttctcctttcccatgcaacggcttgtcgcctggtggataacagtcacacagtggtgatattccagccgtatgatcaggctgcgtagatccaattgatcttgatcccagtgtgaaacttcagaaaaggacagactcggtcggtatcgttccggaaccgtcatccgccaggcttccaaatccatatctaactgccggacagctgtcaagagctccgcatcaggcttgagtaatgctgaagccgaatacagcgacttgaatacccgagacttgacctggctcaatttaatgtcactaggaaatatcctgcagggatgaagtctctccactgtttctagatctgcgcacagatgctccacttcgtatgcaaaggttctcaagtcacagaattcgtcaataagcataggaggttgccgcgttcgaaatgacatctccttatcgatagtataacaaatccagaacaaacaccgtaattgtcttctggtgcgaagcaaaccttcagctgaatcagtcttcgaggaaggaacaaagatttgattatgcgcccgagcgtgtaaatgaaatgggtcgttagagaattggtcgtagccgcagatttcagatttcccgagtagaattgatatgccaacttaggtatagttagttttaattgcaggccataagaatatggagaaagggcttaccagcatgacgcatgtttggaaggcctcaagcgtcatttcctcaagaaacacagggatactttggttaatcttggcaatgtagccacctatcttgtccgtcggggtcaaaggaacgccgatgtcaaagaaatgagctagtatcaaaaaagcgaagatacatgtcctcgcgccggtgattttggggctatcatttgaagacatgtaagcccaacggattgtctccttgaataaaatagagtccaaaaccggtaaaacccctcgaaacacggatttctggtaggactcggcgcattgctccacaatggattggtcagggagagtcaatctgttgaaagaccccatttccgacggttctgaacttgaaacagccgaagatcggtcgttccgctcgaccgtgtctagagcaaatttgcttttcgacaaaagtcggccagatctagcttgaatccatttttgcccttcagccgagaaaagaggaagtcctgtggcaagattgatcatgccaatctcacgcccagcagaatgaatcactccactaggttgagtcgatgacagcgagagtgttgggcccttaccaacgctggcctgtgactcgcttttcaggctattacctgatgacatcaatttagtgacatggtcgcactagctgcggggtcaggataatttcttctttcctccccattcctctctaaaaatagaggaaaagaaaggaacaagacaaacaaggaaagataacattattgcaaagaggttgaagaatgactcactatggctgcttgacaacggtgccttaacggtcttacgatgtaaagtagatgattctctgctatgtggtattagtacatgtgcaagtgtttttgcataggattgtctgttcctcgataaagagtgccttttctggcatctgttgtacgtgcaatggacctggtagtggcggcaccaaaagcagatcggcaatacagcattacatctcaccttaagataaacgattcgacattagtgaattaattttatcgggcatggtgatgcagtgtattgtattaccttgcgtttccaacaggaatcacaagccgagattttctgtcctcgatcgcctcgacgttccatggccacaaactcagcagggtccgttagttcagaggtcaatgcgacaataacgaagctgcatttatgtttgtttgcttatttaccggaggaaattagcttgaatgggtaccgggaggttgcgaaggaacacgtggataaatagaagagcatggaggagagctgggctggataccgcctaccagatccgatactcttacgtgtcattggcagattgttattatcctgcacaggatctccgggagagtagcttactaagcagcaagcgtcttgagtttgtggtcggttgcgaggaacatagggcgcactagcacgtcattgccaatggtcagatcggacagttcttgaggtatggtttagtttagatatgagagaacaaaaaaagggggttttgtgcttcaatagttgatgccttcggaactacccgcgacgtcttgcccaacaaccatgagttgttcatatgattatgacttccgctagtggtcgtcgttaggactgctcttggaatattgcggcaagattagtggtatttttcttgaagaaacgtttaatacaccgaattctaacgccgatctatctgattttgcgaacacaactcagatctctgccgccttgatcgcacatacaccaatgagcggccctataattgcaatgctaaggattgcggcgaaagcctcgcgcaacgcaacaccttgacagcatgctcgcagactcattgcgtcgaaaagcctaatatttgtgatcaccagggctgcgatagagttgtttcagatatgacgcaccctagcccatggtcataacccatacattaactatcgctgacgcttggtctgtcatcgcctaagcgacatgggaaagcggcattacatctgccacgagacgaattgcgaatggaggtaagcaaaatgtaaaccattgttcaaagaaccccaccgatttccatttatcgcggtctttgagtacccccaaatcccagatgggcgcaaccgcctctaatcgtgcaagttgtcagccttcaagtggacgggtccaaatcctctgtccatgtctactcagtctagcgacattttcctacacatgtaagtgttcgctgcccctaaagaagtgcaccggatagggtttcggacagcacggttagattggacatctggcgagagtacaggagagcatctgttcttcctgccccgagttgagacggccacgtagaatctccatcgggtacacgaacagttgctagacactatctcccggcatgttctttggtgcaataggcactagcttttgactgtccctgtggcctcgtatggcatctctaccacaacccagtcacttgacactttcttcgctagctgcgctaccacgacggtatcccttgatccgaagttttcaagtgatactggcccataacatgtgggtttgttcagagtccagacacaaggaatataagctgcttttcatgctgtagttctccttcaattacaacgtcattgaagtatttttgcttctaaacaataggaaggacaactccgaatagccgatccctcactcttctcttgcgttatccatgaagcttccaaattgcgtctggaagggggatttcagttctcaagtacgcgtatcacccgatcccggaatagttccaacgcctgttcgagaaagcgcagccggaatagctgcttgtcgtggcgaagctgaagaccgtccccctctttgctcagatgtgtgccagcctctttcactatctgaattctctgctctagcttctggccatggatttgcttggacacacatggctccaataggcatctatagagtccaagaagtccagctgctggaaaggtgaacttgggatcgtggcgttcgaggtctgctagcactttcaagatgggttgaaagggctcgttcgccagggtatgtcttgattctgcttcctgttacgaggaagtgggctgcaatggtcagccagaatatttgaagttcctgtggtttgtctttttcgctaagggtgggcaattcactgggctgctgatctccttcaatttcctggtctgtcgagctgtttcgtgcgtccattttgtccgcaggagaaggtcaagatcttggcaggaccgtttccatcggggctttatgtcccttatggacaagtcatgcacacgcaggtggctatggacttggttttacaatcaccactataaacagtcaagttctgactggagtttttttgcattttagtgggctgttgacaatgtattcactaataaggatcgtcggttggggaaactgatcgagcctcacgatcttgagggtcaaagtacgaacgcttggtgaagatatgtatgtcaattcgacacctcttccaaattcgttgaaagcctcatgaatccgacaaataaaacgttgtagaacttgcagtgatcaaacaagaacttcaatgtatcttcgaaatttgagtgttggcaactatggctaagcttcaacgggttgataggtcgaacagcttacatttgaccgtaaccacgctttttgcagtctagacagacagatccgcacaggtcaacacaataaatgcaacactaaagcgaaaaaaaaaaatccaaaaatccaaaaattcatgatttctcgggatgaaactgtgggcggtttccgatgattcatcgttagatcgctcacagatgaggtgatcagaacgcgaaatataagcctgccattgcggatggaatatcccccacaaagccagttagccaacgtttcttgacagactcagcatcctttttcttgataccactccaaattgtctctctcgctgaggatctaaaggcatcaagaatgtcgttgcaaatagttgcggtaaaaagaagacatgggcttcaacaggcctcaattacgagaggcgcccccaaacccttctaccaagcagcgcacttgcgcaaaaagactagccgacaagcctataaatacgtcgtctgcctccggcaattcactttacaatttattcacctgactctgtaaagccgagcaagtctgtgtctatgaaggggaggtatcgactttcaatactcgacggccatggaagccatttaacccctaaattcgatcaaatttgcgaggataacgatatcataccaatttgtatgccaccgcattcttctcaccttttacaaccactcgatatcggctgttttgcggtcctaaaacgatcgtacggtcggttggttgaaacgataatacggcataggatcaaccatattgataaacttgattttctcgaagcatacccttctgcacgaattgaggcttttaaaccagagacaattaaaaatagcttctcggcagccggtttattaccttttctacccgatcaggtactttcgaagctaaatatttgtcttcgtacacccccacccccaagccgggatagcgattgggacccaaaaacgccttcaaactatattcaactacaaaagcaagcttcgtcaatcaaagcattacttcgtataagatccagaagccctccgagtccgctaaattcagcgatcaaccaggttttaaaggcatgccagatcactatgcaatccgccgcatttctcgagaaagaagtaggcgatttacgcgccgccaacgagaagcagaagcaaaagcgtactagatctcggaggcatatacccgccgaagaaggcctttcagttcaagaaacaattgaagcacctccccccggccccggcatgcctggagaatctactattcagccacgtacgcgggccccccccccgggggtgtggaatatgcagaatgccagggcatagaagagaaacatgtctagatagacgagttagttagttgatttaatttaatggcgttatggttgagataacgtaatccactaccgagtgacgcacccccacccaacttcctgaattcaaatgcatttatctcaaccaaaacgccattaaattaaataaactaaaatcatcatctatctggacatgtctctctcctatgtcctggcttcctacatattccacatgctcgtctagcctgggggggcggccttaaaccttccgaaacctgctcacgatagttgttgatacgcgctacttgggcctcaaatgactctgaacgtagctcacgaacatcctgaactgagagatccccttcgtggactatcgtccttatagatcgagttcgcttttactttttcttctcgttttcagcgcgtaaatcgctcacttctttctctagtagtgcggcagaatgcatcgtgatctggcaggcttttaaaacctggttgatagcggaattgagtgggctaggagggctccttgatctcgtacgaagtagtgcttttattgaggaggcttgcttttgcaattgcacatagttcgaaggtgtttttgcatcccaatcactaccccggctagaagggggggtaggggttcgaagacgaatatcaagcttcgaaatcactctctccggtataaaagggactaaaccagctgctccgaagctgtttttaatagtctgatttaaaggcttcaattcgtgcgagagggtatgcttcgaggaaatcaagtttatcaatatgatttatcccaacccgcatttttgcttcaaccagccggccgtacgagcgttttaacaccgcaaaacagcctatatccaaaggctgtaaaaggtgagaggaatacagaggtatacagatcggtataattttgttttcttcacagattttatcgaacttcggggttaaatgacttccgtggccgtcaagtatcaaaagccgatatacccccttcatacgtatagaagtggtaggaataaagagctttttcaaccagcgaagtccaatttcatcagaggtccatccattaggactaacctcaaatcgccaatcgtccgggaggccgtcaaaccaggattcaataaagactttgcctttaaaaatcacacacagtggaagggcccaatcagcagcatttatacacttaatagccgtcacccattcacgatttccaggttgtaaaagtgctcgccgactgtagtattcgcttcttataataaccttcgcagtcgccgttaatcccatcgcaaaacccgtctcattaaagttataaacgtcatccggatcgatcctaaattgtaggatagttttttgaataagatcaaaccactcctttataatttttggatcctcacatttcgcacgctcgtagttataacgtttcgagaaacgagaggagagaagaggacgtcgtttaacaaattttgtaacccaattttcgccaaccgaaagaaccgggctagatccgcgcttttcaagaagaagattcgccatttctcgtacagtagcaggccggggggctgctccacgtagatccatagagacgatccatttttcaagagattgctcttcaagctcagtcagtttatatgagttagcgcgtaaaatcgcgcggttttgaacaccccggaggcggcggcggagggtagcctcaggcactttaaaacagcgcgcagcttcacgaattgaagagattttttcattcttaaaatcttggatagctaataagatcctaccctcttgctcggttgaatttttagacgatcgagaacgaattggtggcatagtgggtggttgaagagagagggttatattaattgacgcgttttgggtgggggtgcgtcactcggtagtatgcgtcactcggtagttaaatgcatttaaatttaataggttgggtggggtggaccactcgtttgtgtggaccactcgtatgtgaaatacgttatcgtaatgtaatctagttgtccccgctacccagtagtaccttgccggaaagttgggcttcaccgtctgatagattcacgaatgaaaattttagctatattaggcctagtgtcgctataagtacaatttgagagaaaaaaaaatgaacaaggaaaaaagagttaaggttccaaaattattcttaagtgaaagtaaggatgtctttctctgaaccaatcaggaaataggtttagaaacggccattgaagacctcgtagttaacagagcactgattagtaaatcaggatgaaacgccgaaaattgaacggatctaaatagtaaaccgaaaccttaactcttgttctaggctgtttccctttagacatacaaccttatcgcattatgtccgattatttaacattcatctttgcccttctgggtgcaaatactcttgggtaaaatcactgcaaccctgctaagatgttaattaaattacctacttacatagacttcgcggaataccagctatactagtcagttttgtctttcactaacttaccacgcttcatctgatatgtatacaacgataaaccgttagggcttttataaccctgaccatggtagccttagggtctaattctagataccaattcattttttcataaattggtttatctgcgtatttacctcctaattatattaataaattacatagttaattacattatgtaatttattaatatgttacttgcatctaaaattgacttgctgacctatcatgcaaaaggtacgctcttattatttatttatttaagttttcacaaaaggtgaaggctcggggagagtcgcaccaaacctaccgttgtgtgggggtagacccacctagggtgcctacccattccgcgctgcctttcttcctgctgcctttcttcctgctgcctttcttcctgctgcctttcaagctgcagccacagattttatctctgcgtctccctaacatttgagcgagacaccggttcctgtcttgatcattttcaatcgtagaccaacaagtcgtcatcctcaacagttgccaacggaatgaacaagacatctcacacggacgagcccctcgagggtgacggctacaaccagaaccccaatccaaactctaaggacctgaccacgaatgaggactttaacggtcttgtcaacagtcgggccgtgcgggaaagcgactcccaagcactgtcaaacgcggcctcgaacgcctcaggggaaatagccagccatgctcctatccaaaaggacgggcacggcaaggccacctatcggctggctcagcggtcaattgatcgtggccagccccctgagggtggtatgcaggtacctgtaaccgcccaccccccggggtttccgccagcttcggctggtggtgacgccgaccctggcacgctgattcagcgcgcccggaagatgcttgctacctttggctccttcatcggaccgggctttatgatttcggttgcgtacagtatgtccagggcgctgtcgtcctgcagtctttcccttcacctcacttacatatgtgcacctagttgatccgggaaattactcgaccgacatcgctgcaggagcctcgtaccgcttccgcctattgttcgtcgtactcctctccaatatatttgccattttcctccagagtctggcaatcaagctcggtaccgttagtggtttgaacctcgccgaggcatgtcgtgcatttctcccgcgctggctcaactatatcctgtacgcctttgccgaagctgccatcattgccacggatatagcagaggtagacccctagtttgctccacgtttcgtatgttgtgcgtcgacaaatgctaactggccaggtcattggatttgctattgcattgaaccttctgattcctaaggtaccgctggtcgcgggatgcgctatttccatcctcgatgtcatggtaactctgttcttctaccacccagaagggtctatgaagggcctaaggtactttgaaatttttatcatttgcttggtactcgctgtggtcgtgtgcttctgcattcaattgtctctaatccgtggtaccatgcccggggaagtcttcaagggttatgttccgtcaaaatatctcatcgagtcggaagcgtgagttcaaaattttcctccacccccttcatctttatcctaatgtttttccagtatctaccaggcctgtggaattctcggcgcaacagtgatgcctcacagtttgtacctcgggtcgggcattgttcaaccccgcctacgcgaatacgatgagcggagtagactcttacctcgtcagcttgcatcaggatattcggttctagatgatggtatcgacaaaggttactacgtcccgtccttcagcgcaattaagcactcgctcacggtatcgattctcgagctggccatttcgctcttcacatttgccctctttgtcaactccgccattcttatcgttgccggtgccgcgctatacaacaacccagatgccctcgatgccgatatatttggtattcacgatctgctttcaaagtccatttcgcccgcggcaggtatcatattcgctctggcgttgctcttgtcgggagtctcagcggggattgtctgcaccatcgccggccagatggtcagcgagggcgcgctgaactggaatatcaggccatggctacgccgcctcgtgacccggactattagtatcacaccgagcatcatcatcgcgggagctgtgggtcgtgaggggcttaatgcagcactcaatgggtcgcaggtagcgctgagtattatacttccgtttattaccgcgccgctgatctactttacctgccgcgataagtatatgacagcctatcccggcaaagcgcgttggcgcatggctggtagggatgacgagagcgacgtggaccaagtaattggggagggagccgagctcgaacccgaaggtgtcaagatgaccaactcgtggtacacaatgatcctcgccgtcttgatttggctcttcatgtcaataatgaacgtggctaatctggtgttcctgggcaagtaagtgccacagtaccgcaatggcttggtggggagcagttgcaggagggtcactgacccgaggagagggatatccacatgacaattcagtttattgctcccaatcggaatcagaccgtgcgcacttgtttcgttggtacggagcgcaagtatgcgttgcatgggcggagtaatggaggattgatttcagggatgacgaaattcggaaaggagaaggcgagggaggatagaagggctcatcataagaaatagcactctcttcgtcctgagacatcaatatctagcaccttcatgtatccaatccgcatagtaggatgctgataatgaaaagggcctaagggaggggagtgaatgagcgatgagaggcactggcatgtgggatccaacacatgaatattcaatattctactcaatcagatatcaagctatgtttcgaaactagccaaatcaaaaatagaacagtatctatggaaacgaaataaaccgataatttatgtaatgatgattatacgtttttaattggagaatcttcgagttcgtgttccgctgcttcgtcatttgcctccaaaactgtactaactaggcaaccaatgttttcacgaaccttctcatctttgatagcgtatatcagcgcgtcattgacgaactgagccacgatcttcgagatcacaacgatatgttctcgagcagtttcagcccattacaatgattacacatagaacagctccgcaaggagagcttggttgtagttacccggtgactcttggcccctcgtttgatcatatacctatattaagtatcacgaaaagttttcctgcgagcaaaaagtcatacctatcgaattcagtcaaacatcccctcttttgtcacaaaatgttgtccacctttgtctttccggcatctgggtggtccgtacatcaacccaaattaacgtaattcacatacgagccgccaccacatacgacccgccaccccatccaaaaacgcgtccatgaattagcacctagttaattcaaccacccaccatgccaccaaaacgctctcaatcctctaaagattcaatagagaaagagggtaggatcttattagctatccaggcttttaagaatcaagaattttccaatatttctactaccgcccgcacttttaacgtaccgcgttcaacccttcgggaccgcctcagtggtatacaacaccgcgcgacttctcgcgccaacttgactaaattgaccgcaattgaagaggaatctcttcgaaaatggataatctctatggattctcgtggatcggccccccggccctctatggtacgagaaatggcggatcttcttcttaaacaacgcggaaccaccccggttatttcagttggccaaaattgggttacacattttgttaaacggcaccctacccttgcatcccgattctcaagacgttataattacgagcgcgcgaaatgtgaagacccaaggattattggagagtggtttgatttagttgtttgatctagttcaaaaaaccattcttcagtatggaatcgatccggacgatgtttataacttcgacgagacgggttttgctataggattgaccgcaacagcaaaggttataactagaagtgaatactacggtcggagatcacttttacaacctggaaatcgcgagtgggtgactgcaattgaattccagatgattggcgttttgaaattagtccaaacggttggacttctgatgaaattggacttcgctggcttcagaaactgtttataccatcgactttatcgcgtatggtaggaaggtatcgacttttggtactcgatggtcacggaagccaattaacccctcaattcgaccaaatttgcgaggaaaacaatattataccaatttgtatgccaccgcattcctctcaccttttacaaccacttgatatcggctgttttgcagtctcaaaacggacatacggtcggttggttgaaacgaaaatgcggaatgggatcaaccatattaataaactcgactttctcgaagcataccccactgtacgaattgaagcttttaaatcagagacaattaaaaacagcttctcagcagctggtttagtacccttttcacctgatcgggtccttttaaaactggatgtttatcttcgaacaccaaccaccccccctagcaggggtagcaattcaagccagaattttacaccaaaaacccctgctactgggaaagatctacgtcgataggcttcgtcaatcaatgctttacttcgtacacaatctcgaagcctaataagtccttccaaacgtgcattaaaccaacttatcaaaggctgccagcttgcgatgtatagcgctattttactagcgaaagaaaacaaggagttacgggatgaaaatgagaagaagaagcaaaaacggacccgatctagaaggcagatacccgctgaagaaggcctctcagttcaagaagcttctcaattgattactgaggtggtggaagcatcagaagcacctctatacctcccgcgcggaagccctcaattagggttagaaccacgtccacgggctgcagcaaggtgtagtgggtgtggaagaaccgggcataaaattaacaggtgtccagaaagatagttgaatttagtttaattaatttaatggcgttatggttgagataaatgtatttaaaataggtagaagaagattatgagagagatgactaagtagaaaaatccaacctccatcattgtcgtcaatcaacacttttccagaaattgaagtctaaaactttgtgcctactcctacatcttataattctcgagaatatatatttgaaaactactctctatattaattgtatatcgagggcagagtacaatattatttcaacggtcgacgactaccacttctttaatatcagtctgtagtccaggtctctcgatttggcccttagccttgcagtaagatcttggagatgacagaccagccacatctggcatagcttaggcccaggcaccgacaatagacatgcagaaagctcctaagcagaccaaaagaaatgcataaactcgtcttctcccacgaaggatgcgccagctctcgtcactaagaaagtcttccgacatcagctctacgagagaggcgaagatcaaaagtccagcggaaatggcattcataatgccaacaacgagcaagccgacttccgagtccgggctatagagtgtgtgggttgcaagcccgatcgcttgtccaataggcgttctatatatccgtcagttcttcaatttttgaatgaccatatgtgaattaaagaaacatacgtgcagccataggcaagtgacataaaccagggctgtaattgcttttcagaccaggaaagcgaagcaattcgggatcccaatgcgagaccttcgaaggtttctattgactattacttatttcattcacaaagaggtagaaagatcaaataactcacgatggaatacaattgcgatcaatagaatcacaaattcactcccaattgacacactgagcgacatgccaataaagatactatgaaagagaatacccatttcaagaaggtaaacctgcatggtctctttcctttggttctgctccggtgtaagaatatgatgatcattatctcgctctatatccgaccggaatactccattttctttctcgtgatgagtttgagtctcaggagtagataagactctaacaactgtttcactttcatcgctcatgtggtgaataactcggcttatacttgaggatcttccgaccagaggacccatatcacgtacatggggttgataatctagtgtaacggaatgtgagctttgcgctcgaggttcagccgaggtataatcatcaagttgtgctagcgtatctctctcgggaccggaagaggatcgcttctgtgataagtcataatttcctccacggcaaatactctgagctggactaaataccatctcaatgaccgtgataaagaaaacacctgctagtgcaatagcacctggcatggctgggtagtcatttgtccagaagctggaaagacatgggtcacctaacgattgaaacgcagttggaagcagatgtacgaatgcagtggcgatcaaaacgccagttccaaaatgactgacgaaaaatagaaatgaaggcggaatgtgcagtcgagggaaccgagttgcgagaattgggaatgcacatgcaatagtcgatgttccgaggataatgaacagcgctgcgacatgtagtggaagatcgtatgcagcttcgcggacaccacctacggcacaacttgatcgtttggctggctgtgagtcttgctgttcaacaaggaaagttgtttcgagagctagaggtgcctttgggataaaacaattgcctaagctgttgtgggaaatcaaggcagaaataaaaaggaccgagagcagccaaagcgcccagtctttgactttttgatacgacaagggggtcttgttgagatctagttctccgtgacgaatgctaagatttttttggggagcgaggggtcctatttatttgatcagcgatacaagcatcaggggctgagtatgacatccataccaatggacgcctcgcctaccccatggagacgtttccccagatctgatattctgggccagtgagcatgagcccagtttgaatggttctgcagtaacgctagtccatttttatcgcccttgttctcacgggtgttggaaatgccaagaagatcttgacgggtcgtcaaatcaggagcgaaacgcggcgggttctgattccactcatcatggaggagagtatcatcggtccgggaggggcaattcatgatgcaaaggtgctcagtgtatcagcttatctagaggttcagagaaaaggaacaggggagcatctatgcgcttaaataagaaaataatccattaggcaccatcgattcgaatgcttggcattcggtggactccggcccgatttcttggcagcgaggaccttttcgccgagaaactgcgcgatcatgaacaccgcttaggcggcgagagttgaacacggcacatcaaaagtgcgagtagcaagagcagtagggctctttgttgtctcttaaaagcctagcttgctaataattcataccctgttgctctgctgaatctagaggatcgggggcgaattagtgattagtgacataactagtgttgttaaattaattaagtgctaatttatggacggatggggtcacttcaacataagtgacttttgccaagccactccatttattaactcatttactaattccagcccagcagaatccgcttagaagttgacttcctttttttcaacctaacccgtaaatgctgtttcccgctcatcccaactaataatttgagtgtatcatcgttttagatgaggttcaaaagcagactttgctaattagttacaagttgtatcagctatgtattagctatgcctaattggggttaatacagaagggcttacaatcataagataataccagttagtaagtggccagtaccttgctccaaatagtggagccctggaatgttcccgcctgcctaaatcggcggttaatatatgcgttaaataaattgacgcaagatgctagatcaaccctattataccctaatacctccgtaactactccgtagacctcggcatttccctatggattctcaaaattatcctcccagttccgatagagcaatttccataggagtaggcggtttctcctagctcgtccgtatgttgtgggattcccatagaatctcataggaatgccacccactttctacctaaatctacataattctgatttcggatgcataggtagaatggtttgatatttaagccacgggcttaatgatatttgcattatttacagtccttttggacttccatgggaatttggtgtgtgccgtccacctacagctatgggaatattccatggatggataccatggaaaatgccgtctatccacaatcgaaggaggccctgcagatcaagttcgctaattccgatcaccgggtgtttcacacgcattccatattccggaaaagtcttgacagtcctgatatgtcggtatttgagtataatctctgcctcatttcagtcttgaacgattttcctaggaagatccgtctcgccttgtattttctgaagtccattcaatactgaatatcctcgacacatatttggtttcactcacgcctccttctttacacgagagctcgtcacccagcaggccaacgacgttcgacctcgtgggatccttatggaacatcggttcaccgcgacgggctcaagtcattggagttccgtgggaaacacagatcggatcattccccacagttcatttcgtcggccaggaaaccgagtgcaacacagatcttgtccactgataattgccctgatacttacattaatcgcaaccgcatttttcctgcccagacttttctggaatggcttgccttcgaatctgtttcttccagcggacactccgcccactataaagtaaggtcaacgttcaaagtcatgcgcagccaattaacccaaataacttcaatatagaattatcagtgataagcacgacaaggtgttcgctacgggctgcctatccgttacttatgagattcagagatctgctcgtatgaacgctgctttcgttgtcctcgtgagaaaccaggaattagatggaatattacaatctatcaggtctattgagagacatttcaaccagtggtttcactacccatatgtctttctgaacgacgccgacttcgacgaggaattcaaagcaaagatcaagagacatgtcagcgctcctgtggagtttggtaaagtcgaaagcactctctgggactttccagattgggtcgatcccgagattgccagggagggcattcaaaaacaaggtgatgctgacataatgtatggtggaatggaaagctaccatcatatgtgtagattttactccgggtttgtcttctcgaagtgcacattaataaaatgctgaactttcaacaggcaattttacaaacatccgctgctgttgaaatatgaatggtactggcgcttggagcccgagattaagtacttttgtgacatcacatagtgcggtttgatcttccttttctttttctgaatttaattaacaagcgcaaatagtgacccctttgtcaaaatggccgaggcaaataagacctacgggttcactatcgccatcaaagagctccaagagacagttccgaacctcttccgatatgcatcggcatacaaacgcacgaaaggtatcaagtccaagggtctctgggagatgtttttaaatcgaccgtcaggagtaaaattgccttcctcggaggacgagaaatggaataatcttcctgaggatatcactatgttggattccgatcatgttcattcggatgaaatctgcccggatgccatggagggagagtcctacaacttgtgtcacttttggagcaactttgaaatcgcacgcctggattggtatcagagcaaggaatatcaagaatttttcgaaatgatggagagaagcggtggattttggatggagcgagtcagtaaaacatccccccttccaaatggacgcatgcttatcattaaccgagtttgtagtggggtgacgcgcccattcactcactcgccgccggtattcttctttcacccgatgatgttcactacttccgtgatattgggtaccgtcacaccactattcaacactgccctgctaatgcgccagctcgacaattgcctcgcgctccttttcttgaccaaaccatagaagatgaaaaggagcgtttggaggaagacgaatactgggctaattttgactcggtccgggagaacggcgttggctgtcgctgcaggtgtgacactgatgtcgtcgatgccgaagataaagagggttcctgttttgccgaatgggtggatgttgcggggggatggacctctccatgaaacatgaaatacatagttattcacatgcatgctctcgcatacgatcttgacccttgcgtgtgcctaggaatagaatcaatcacagcaaattcaattagtcttcgaggtttcgatatcgaagacgtgctactccactacataagaatttggtttacgagtttcttcgacaacttccaagggatctattggttcgaccttctcgagtcaatcattcaagacgtccccgtccatatctacaacttccatgaaactggtctataaatcgaccaaggaaaacctccgaaaggtgttagtgacggccatagccgctcagcatatcttccatgcgagggtacacgcgaattaatcaccaaaatcgagcgtatcaccgcggacgggttcgttcttccgaaggacaaatctctctatcgcgacagtttcgagccttcggccacatcttcgggatccaaattcgaaaacaagctttcaaaccctcttttcgaggcgatggtatttatcctttcaattcttcaattgttcaaagaacaagctagaaaacccagagttacgagttttcggaaacgatacttcatacttctcggatgctacacatccacaactccaccaaacgggtcgtattcaaataaaatcgagaattcgatagagctatggggcggcggaaatgtatcccattggttccctacggtaatagtatggacgcgacacatgctgacgcggcctcgtatgccacgcattacgaagacccatagcgcgcagggtccaaaaaccccctttagggcctgactgcctgaattagcaccgcgctatacaatgtattgtaaattttaattacaagtccaaaaagataaagcctttgggcccgcacaaatgtcggcatcttcatatttctggagggtttacaagttcaaaatatgaagcttttcatcccagaaggcttcaatgctgagaaataagggaatcctaggatttgtgtcacatttcatgcccattttctaaggcattcctgttgtcgacctcgaagagctctgttatggtaattcaggttttcaatgtttctgccgttctaaaataaggcattcaaacatcaaaaccccttttagggattttgaaccctgagtgctatgggtcttcgcatgctatttccgaaatccggagcaatcaagggcgaaacgatcagtttctcgttcgtcttcggtcaaacccggcactaaatttgctggtacaacaacaagctagtttttctggtgatacttccctgtttgctataatctgtgacattacaaaggaaaccaagcatttctctcctctagcaattgattatcatggcatactttccagcaatcttcttgctgactctcttatctgccattatgcctgttttatgcagcgcgacatcgaatgtacccagagactgtcacccattgccaaaacatttcggctttcttccccatccggtcaggttcgaagtcttgcgcaaagaaaaacatgacgaaaaaatatgcttccagggatcgatcgaaaccaggaaaagccaatccatggagatgaatcaacctagcaggcctcaggagccgttttcatcaacgcgagccgaaaatgacgatacagagacagctgttactacttcacaggtaggagaacctctgtgggttctgaaagtggctgcaggagaccttgctaatcaatcggtagggttctaatggcaaactggcggagggtacggaactcaaattcccaacattcgcgaagaagagccttcccgctactgagcatggactcaatgatatgagctcgccatttccctctaaagaagatacatccgttccttccgttgacagttcactccactcaatcatttattcattcgccatgatcattgtctctgagattggtgacaagactttcattattgctgcactaatggcgatgagatgctcacctttgtttgtatacagtgctgctctctctgccttggttgcaatgactctgctttcggcccttctcggccgcagtgttccgacattgcttcccgatacatacacaaaaatgttggcggccgtactattcttcgctttcggcttgaagatgcttaaagagggctatgaaatggctccaaatgaaggcctcagcagtgagatttcggaagttgaaacggaattgaaggaaaaggaccatgagcgagtacgtgacggcgaccaagatacatatggtgaaattttcgatgtggaagctggtcatgatagacaagattgcccagcggatcagtcacctgcttcgctaggtagaaatttgtctgcaagccaccagtttcctggttctgttcggtgccattggcaatctctcatggcaggaatgagcaacctattctccctttttctcagccctctatttgtgcaaatattcgctatgacctttttcgcggagtggggtgaccgcagtcaactttccaccgtggtaatggcaactggtccagattattggctagtgattcttggagctgtttctgggcatgcgctctgtaccgggatcgctgtaattggtggtcgagccattgctggtcgagttagcatgcgagttggtaagtggctgccatgttgcgaaatcctggatcgaaactaacgtttacagtgacgttgggcggcgcggccctttttctgctatttggactcatatacctgtttgatatcatccgataaagcaaaatgctccacctggttgagcgtatatatgtccgtgtcgaccactgtttgaatatgtttcggacaagttacaagcatatggttgatgtaaacaggcttatcaagacctgaaagaggtgtgcttcctattgtaagattaggtcatgtggcctcctttttgctcctagctttacggagtagtcctagaacaactcagatcgagtattccgagatttacatatccctctattacttatttccatatacctacagttccaccgtaaagtttttcatactacccccatcaaacatatatctcatacttgcaatttcgaggcccaatatacactatagcggggcatggtggttccaaagcagtggtgggttttgtgggagctgagaaaaacaagctatggtaatatcaaatggtaaagtcaaatcagaatcgaatgatatcgccccgtctaccccataggtttcagctccatcttgcacggttagtttgaccaaattcatcagcatcgccaataaatccgcaaccaaaaaagaccctagaagtttattattagagttatttttcacgccatacttattatgttgtgattctctctccaacaaaacattgctttgcagagcctgagcgcatcgcagatcttcggacccatttagctgctgttactgccccaatcgcagtgtgtagtcgatgagacgatttttcgattttcaccatcttgtcgaatatcgtcggagaacctttcattctcgatatggataatagcacatagtcaagccgagagccgctcatatctgatttcaaagaagcttgcatcacggctgctgtatgatgcatcaatgccagcttgaaacacattgtagtaatttgtggcgatctttatcaggtacatacgtatctggtttggagaattccgttccgctctaagtctaccgagctcttcgtttttctctcagaaaagacgccggatatcatcacgaactttgggtagctcgcgctggatatgagtgtctaggatttcttccagaaaacatcgcagcttgtcgaccccaacgcgtgaaggatccagccctgcttcttccaaacctcggttgaaaaatacgctagtcatatcttgcgtcgctgttctgtggttattcctgtcttcagcttcgtcgggctggtttttttcaggatgaaaaatccaaaggtgagtttgatgaggtcacagttctaggcaaggcgagcgatacgtgcctccgtaccggcattgatgagatatgacttgggaataataccgaaagtgcagagaacatcctaaacgaaccgtctcgcacgctagatgatgccctgggtgtcaacatcattggtggccggtggctttagacatcatcctacgaactatgcaaatcccaatgcgctcgcttagctctttcacataacaagaaggaatattttctcctcggccaggaaggaaccaatgatccttcagatcgtaacactcgtggtccattccccggcatcttgctttaacctcctgacacatcgagtattcaatccattacctcgattaggccgtttcacacatccggccttagctgctgtattatacttatcatggtacttatcatggtaacttccaattgcgtccgtatcggtgaactcatctgcccagtaacacaaaagaactgctccaactctgcggacatagacagcaccgacagcagagaagagcctcaaggcagacgagcgtagtctttccatctctccgataaacattggatgggaacaagatggccgttcctaacatcagctcttcacagtaaatggccatattcgtcatagttcgcatgcaccgaactttacagggaaagaactacgtcgtcagacttcatcaatcaaagctttacttcgtacaagatctcgaagcccgcctagcccatcagatcgtgcattaaaccagcttgtaaaaggcttccgtcttacaatgcaaggtgctatcttactcgctaaagaaaataaggatttacgcgccgccaacgagaagtagaagcaaaagcgcactagatcccggaggcagatacctgccgaagaaggcctctcggttcaagaagcatctgcattaattactgagacggtggaagcaattgaagcacctatccccccccccccccgccaccggacagccccgcccannnnnnnnnnnnnnnnnnnnnnnnnnnnnnnnnnnnnnnnnnnnnnnnnnnnnnnnnnnnnnnnnnnnnnnnnnnnnnnnnnnnnnnnnnnnnnnnnnggaacaattggaaccccctcccccccccccccccggcgaagaaggccttcaccacctttacagccccgaacgagagcattaccaacatgcgggttatgcaaaaaccaagggtcataaaaaaattgcatgtccagagaatagatcattttagtatatttaatttaatggagttttggttgatttgtatgcatttgaaattagtaggtttggttggggtggccactcgcttacaatggccactcgcttgccgaatacgttcacgtatttcacaagcgagtgacgcagtcagaaacacgtagtaaatagcataaactacaaccttatatatcaacaacaacgtccttgtttgatttcatatctattcgatagctgttgataagaatttaaaatgatatataacgtaattcacaagcgagtggccaccacaagcgagtggccaccccacctaaaaacgcgtccatgaattaggacttagttagttcaaccacccaccatgccaccaatacgctctcaatcctctacaaagtcagtagagcaagagggtaggatcttattagctatccaggctttaaagaatcaagaatttaccagtatttctctcgccgctcgtactttcaatgtaccgcgttcaacacttcggcaccgcctcaatggtatacaataccgcgcgacttctcgcgtcaactctactaaattgaccgcaattgaagaggaatctcttcgaaaatggatagtctctatggattctcgtggatcagccccccggccctctatggtacgagaaatggcagatcttcttctcaaataacgggaactaccccgattattttagttggcgaaaattgggttacaaattttgtcaaccggtaccctaccctctcatcccgattctcgagacgttacaattacgagcgtgcgaaatgtgaagacccaaaaatcattggagaatggtttaatcttgttcaaaaaactatcatttaatttggaattgacccggacgatatctataacttcgatgagaccggatttgcaatgggattaaccgcaacggcaagggttattactagatgtgaatactacggtcggagatcacttttacaacccggaaatcgcgagtaggtgactgcaattgaatgtataaatgcggtagggtgggccctccctctgtgtattatttttaaaggcaaggtctttattgaatcttggttcaatagccttcctaatgattggcggtttgaagttagcctaaatggttggacgtctgatgaaattaaacttcgctggctttagaaactctttattccttccactttatcgcgtatgaagggaaggtatcgacttttggtacttgacagctatggaagccatttaatcccttaattcgaccaaatttgtgaggaaaacgatattataccaatttgtatgctaccgcattcctctcaccttttacaaccacttgatatcggctgttttgcggtcctaaaacgatcgtgcagtcggttggttgaaacgaaaatgcggcaaaggattaaccacattgataaacttgactttctcgaagcatacccttccgcacgaattgaagcttttaaattacagacaattaaaaatagcttctcggcagctggtttagtacccttgttacccgatcgggtactttcaaagctgaatatttatcttcgaacgccaaccccccccccctccccctagccggggtagcgatttaagccggaattttaccccaaaaaccctattcaatggcaaagatctacgtcgacaggcttcttcaatcaaaggtttacttcgtacccaatctcgaagcccaacaagcccttctaaacgtgcattaaaccaacttatcaagggctgccagcttgcaatgcaatctgccgtacttcttgagaaagaagtaagcgatttacgcgctgaaaatgagaagaagaagcaaaagcggacccgatctaaacggcagatacccgccgcagagggtctttcggtccaagaagcttctgaaatgattgctgggttggtggaagcatcagaaatacccctagaccccccgagcggaagcactcaatcaaggttagaaccacgtccacgggctgcaccaaggtgtagtgggtgtggaaagacagggcataagatcaataggtgtccagataaatgattctttttagtttaatgaatttaatggcgttatggttgaaataaatgcatttaaaaactagattgttgattggggtggccactcgcttgtggtggccactcgcttgtgaattacgttatcaattcttaggcattcaatgggctgtaatatcatagtatcgaaaagtacatcgctctaagctagaaatatgtatatccttatcactgattagtaaaaaattctctaaactttatagtgagactagatgctacctaaaaaccattagcctgtatggaaacaccccaatagaccaccgttgttggggtatcaagttgtaatttatcccatttactatgtgtttctgactgcgtcactcgcttgtgaagtagttagttaggcctcctgtctttcctgcctgaaggataaagccacaaatgtaggggttccgagttttccccactgcgatatgtagtcgtccaatcggttgtgattgttccgatgctcatgcatctcgactcgaaaatcttcttcacttggaagtttcctttatctctttagcatcaatctcttcgccattataccactttttatgcctcagtactgttatcttttttatattcgtggtaccatcgtagccgacaatgaattcgagagaataggggctgatgtctataactcgactagcaaataggtccgagaaccctaataactgcttctttggctatgtactcttcagttgtctatggccatgcatttaaaggactactggcccattgcggagccaagatgacgcggtctgggtaaggtgatttccgcttttcgctagcgtcgaagaacatcgtcggagcagtgaagatcaatattagtatcatgcctattgagtgatatactattgtgcttatagaagctataatgagtctattgtcttaggaaaggcggtctaacccgtaaggtctcatccatcgtacaaatataccagtttattaatcaaggggtgatcggccatatacctttcaagggttgtttttgaaaacatctttgctgttctaactcctaggaaaggcctcctaagattcggtcccccctcgggtcttttgtcttgaatgttaaatagaatcataaccctcaaggtgaagtaatagcgggaagctaccaattctgctgtgcttcatggtcggcccggcgtgtatctcgctactcttgatctcggtatcacagctgactcaaagtgaggaaattgtccgcgatgaggaaactgcccgagatcactggtaaaggcccgatggagacaatgaagactttaaagagaaatattccactggagattcactgtggattcaatgggtgggctgggattcttactacacgaatgtttatatgcttaacgagacgaaagccaacctgtacgtgaatatatggcacctagactacgacgcgttttataagattcttacatgtacgtgatctccagccatagacttttgaacaataagctaaaaatcttgtaaatagcttcgattgatatctcgacttatggatcttatgattggaaggttgacattgatgacaaatacttgatgcagactaacgagtacgcttttagttttgtgcctgacggaaagcgctttaccacctatggcgctaaaatatctttaccgggaatccgtatccagtctaagtcgattacgtccttatccacgttgctagctattctaacaatgccctcgaaagcggtatcctctggtatgtatagacttttaactggcgcgaaagtagggatcggtattggtgtgggcatagggggcttggcgttattatttataataggatttctcctattgtggtagcgacgaccatcctcacaagaggtgaccagggtgatagaggcttctaagccaggctcggtctaaatactggatgacggcttctgctagaagactagactgctgccataagagctacctataggatctgtgttgccggctgagttagtatcgacgtataggggatgacatgagggcatgctcctaggctttggaaataccttttacttattcagccagcttattgaaaattttgagatattcgaggtaactcgatttgcgaaaatgctatttcttcaccatttctatccccgatttgtctgacatatattgttttatttctctgattactactgtattgattgaagatcatgattgaagatcatgatgaagctggctttcacatttatatttttgcttgtcgagaggactaatattacctataggaaatcgcttaactaatacttgtacctgaaagtcctttatctatggactggtgcatttgaagtttagtaggttcttaaataccggctcttggttgaaaagcagttaatttggtcgtttaattttaaatagtcatgctatcaaaatataattcaaatagtgataagagtaggaagcgtctcagtcatatagccgctcctcttctgtagcagtacacttccggcacttttcttctggctgtgttggtgggaagtcaaaatcggacacagtgtctgtttcaatctcctctttcgcgatgatctcttgatacctgctctgtagcaactgcgtggcgagatgtatagtggcccactcccggggcaaaatggtgtcggagatcaagatgtggtcggatagcgtttgtaggtattgaattgtatcgttgaccatttgcctactaacttttgtaagacttgggagtctttttcggtataccagtcgcgagctatccggtatttgagggggggagtgtgaatgtcggtgtcgcttttgtgggagagatgaggccgcggctgctctcttttttgtgtttaaagggggcagtttgtggatttcagcctttgtagcgcttcgaggtaatatatagtccctcgggctagtaacagaagtagctacctctgtagctacagacctagtggactggttaatacatggttgtaaaacctggcttgtatggccgcgattttcgtcgatgaactggctaaaaacctggtagaagcctgtatccgatttattgcctttataaatagatttgttagccgatggatttctctagaaggggatctagaataacgttactagcttgctgtgtacgtctattgtgatcttctgtgtctggtgaaccggacctcgctgatacttgtgaccgcttgtggtctatgattggttggctttgatagtgatagtgttgcactggcaaattattggttggagaaaagggagggcacgagagcatctatggtgaggataaccatggccttttaaatgtttggagctcaagcagttaccatcaaggatatatccacagtcaagatttcgcggcttaccgttattaggccagctcctaggactcctagagggactatggacgtcagtatgtggtcctaatagctacgtatgctaacagtcaaatcaagcatgatttaatctagttgccgtatctacatggtgctcggcccacctactgatttaaagcatattcctaggagcaacctggcttacaacttatagatgcttataagtgggaacttgtgaatgggagggcacttctgacaggcccttgactcagctacgccgtgtagccacgataacgatcccactagctgaatctgtttgatgcttctaggagctctgaactctttaggttctttaatcataattcgttcgttaactttatagtattggtgtttggtggtactggcgatatacgtggtgaatggtgttagaaggttgaattaacgttgatatctatattaaatataaaattccaccgaacaccagctgtatatgagttttccacctatagaagatacctatcggagccatgttagttcccttctaatagcggacttggttaaattcccacttaaagctcgtttctttatcagccccgctataaactgaatagtgacggttatcccgtggcctagagacgcattgtaaactggttggtaaagataaagttaaaaaaagagatagaaaatatgtgattttatctcgtgggaaccgttggctaattttcaattagcggcaaaatgcggtcccttcgagtacagcaaaacgggtatcgcgaacagagtatatataacgtttatgggccccggagatattgaccggcttcatctttttgcctcccactctttactaactgcctgatttaaattaaatcatgcttatcgcttggtctgactagccagcctaccgtggccgatattggagtaatatgtctgttaaccttagtcttcgtaatcggctacagctaggtttggaattggcttctacattttatacagaacctctgctaaaccctaacgctaagccgatggtaaaactacctagtcttaatctggctagtctgcagatcatttatatgcgtcacaatggaaatgtaacttatctgataagactaattaatataccgaagcgttgaattatacgttattcgagactgtcctaacttactaccttggtccccttctccactaccaagagacgaatatgcacgacaaaaagtagctcgaaaactgccctcctctatccgagaatctattcgcgatacgatcttgagcaaatcactgattatggcctagatagctagtggtgtagaatgcagcttgagcgtgacgtacggtggatctgagaagcttacttcgtgggactggaaatagtaaaatttgttgagagaaccttgatctactcttcgctaaaactctataccctatgggtttgttagggacataccttatctatcgcgataagagatttatattaaatataaagtgctctaaaaaatcgcgcgttgatttatttctagaggtggagtaatgttatagatatcagttgaattctccgtttggtattaccatcatatgtgttgaacaacccttgtaagctgtgataggaaattaacgcactgagcaatcgtgtatactccgtgttatctttgcctatagcttgcttttcttatgacttggaaaaagacagtagtcttcctttatatgctggtttaaaagtgtaatcctgcaaccgtgtttgatgtccctacccttacaggtgggaccattccacctaccaagcatatctgtccacgattttttgtagttaggatcctatttcacgatatcggaagaccgaagttcttttatcgccggattattgtagtaacagtattccgagtagactccttgctttgtgttcgtaaaaactttttctaaaggtagctctaccgtttcatgacattgaataatatcataaatattcagcgttatgctagacgggaagtgtaccttatatcgagtttgattatatttccagccatgctgaagagcggtaaagaacctttcatttttgtatctgagatcgcctgaataatcacctgtgataagagtaaagtagagacggtttgacgatttcctagggcgataggcgctcaagttatggccaatgagaactggagaatatctgttaaatgtcaaggcaaattccagctaactagtgtctttgaatatctgtttctagaggatagaaccggtatttatgatattttttatatctgctggtgttaaaaagtccttgatacttaactaaatattaagtggggtttcaaagagctttattgtaaatgactgacactggtgccggtgttgacctagcttataccagggaaagtatttatacttcactgggctatttctgaaattagttaaccttacaaaatattaagtaagagtcccgcattcttgtcactccctccggaatgcacctatgcctgtgattatagagctggttaagaatagaatctatgctctatatttctctgaaagttgtggcctaatgccctgcctatctgacccttgcttatttttaccctagcttaagtagataatttctatgggcaaaaaaacatgctgttggtgtttagtggctttcatgtttaacgttgatgtgaacgttgatattaactttctgacactgttcactacccgtatattgccaaaggtggttataggaaatagtagtaggtatcatttccactagccctttgccgaagcgatatgcagtatacaataactatatatctgagtatagtcgttctcgaaattggcttgatagatataatcttcgtcactctgttctgcccctactgtaaggccttagtgtatattaataatttaggggggggggggggggggtttaatttttggagtggnnnnnnnnnnnnnnnnnnnnnnnnnnnnnnnnnnnnnnnnnnnnnnnnnnnnnnnnnnnnnnnnnnnnnnnnnnnnnnnnnnnnnnnnnnnnnnnnnnnnnnnnnnnnnnnnnnnnnnnnnnnnnnnnnnnnnnnnnnnnnnnnnnnnnnnnnnnnnnnnnnnnnnnnnnnnnnnnnnnnnnnnnnnnnnnnnnnnnnnnnnnnnnnnnnnnnnnnnnnnnnnnnnnntgtggtgtgttggggtggggggggggggggggggggggcattaaattgatagatgtcgaaaaaggcgccgagtatgaaactgtattatagtatgtagattaggtatatttgttcagtcgctgtagttaggtgtaatactactcgcaattttatctgccggcacccagttttgagctaagaatgaagcgagactgccaatacctttgggggatacctatacaaagatgaaacggtctgatggtacactttaaagatcaaaatttcatttgcttagctgctaagcttgctccagaactctaagccacggcgtctctgttgctgatatagatcttatactgaaagcttggagtttagatctgatctaacttgtatcttacttgagagtaatcaaaaaaaatgactatctgcgtttggctttattggtttctaattaacttggcttattgttgtatatatagccttatatttccctcttggcgtccagaaaagaatttgtctataaattccctcggctagttatgatgagtaaaatcgagttggcaattgattgaagcgttctaatttgggaagctcggggacttgaaggccatataagccacgcttgttcgataggtgtatcacaggaagggtgtccaaaatccttatttatgctttctttgataatctaagattctatccttgggtatttacattaagtaatgtcatagctccctgcttatgatgtattaagctctccatttagtttcccagttgtgtccaaaattgctcgaccacagaacctgtatcttatcgcggatgtcctcggtgatatcctcccattctccgttcatattttctagtatgtcagcatctataatgtcgaacttatggctagcccagtctcccttggctagatatcctccccccgtaatgccggttgaactgtcagacgaccaatatatacgcatcagagctatgtggctagcggtaattccacagggcaatctggcctctaagatatattgattagtagttaagttccttaggattcgatctttgggatcgacagattcttctatggccgggagagtcgctccttcctctgtgtaagaccaaaatttaaaattctcctcagcaatattgtagcggagaggcttgggtgttactttactctcggcggaaatcaggtggaggctgtcttgctgaatcgtgatagggagattgtctggttttaagtaatccccgatatagatgagccgcgtgctagcctactcgtattcaatcaagtcacatagaatgttggcctacgaggaaaaaagcaactctgataactttctaccaaaaagccgtgttgtgtactcgcgtttggacggataaaccactagctagtattgacctattgtttgtttgtttgaaagaaaggataggaagattgtgggagtgggggccgtagggcaaagttgaatgcttgagagatgctaatactggatgtaacgggaagacggtacagttgtgaattggatgagcttctaatatggcctgtctggcaagatgcttgactcttatatactggtcttgtgggagaatatatgggggaagattaaggatagaaacgtctgtaagggtaggacgggaagtatggtggatgtagcgaccaatctaatcccggaatacctgatgcaagttttgaaaaggtagttgaccctgggagctgatagggtgaatttagtagctggtttacttaagacatcagacatatttggcggggccgtcgactaactatcagctctgcgtagatatctattaaacttggtatttgtaaagagtttacaacggtgactgtagaaatatcatagtcccagtaaatcatacgtagcttgtaaaactggccataatcactatcaaggattgatcatgttcctgcctgtggttctatctgtgctaggaatacacatcttggtcctgggcgttctctcgctcccggaggcattgaaaagggttctgggagcacagttatagatttcgaggggctagataagctcgagggaacctgaagtagcttgggggtcttatatatccacttaaggaactaaggtcatgttttatcaagtgctagaattataattgcagctcctggcgttacggctaagccctgggagtgattaaataacgcagatttgtgcgtagatctggtgaggatgtcttgtgagggctttctacgaccttagaaggtaagatattgattctaggaccctatcttaagctcctaggctctaattagctgatatcgatatttccatttcttcggtcgccgccgctaggtatgatactactagtacttttatctaccgatacttggtttcgtgctaagatatatgtggaattaaagcgaacctgcttacaccgtttgtgggtacattgacatctagtatatataaaggtgaaattatcgcgtgctgtcggtactccggagtttaataatcaaatttttaaaccagcctggtaaatcacgtgacctatatgtattaaggatgacggtattcatcctagattctgatagttgcaaaggctgcgctaaacccctaaatcacggctatgctctctgttgctggccctaatgccgagcgcttggttaaatggaatcaagtgattgatagtcgcttcgctaatttttcattttcgttacacctccgctgcaaaatataaatcatgtatgctgagtggaagctagtcgagccgaccggcgaagcggtgtagaggtagaaaggttgggcggtagatgagcgcctgctagtccggctgagcgacgggctgtttacctcactccgctcgactgatctcccttagggccccactgaccgctgacgcggctgactctgatgagggtcattgggtgatgaattcctgataacggtaagttctctgttgggagataattgacgggtgcactgacggctcttgtctgtgttcgtgaggtgactggtcagtgctgtctgatgtagggcgtcccctagaggctgacgatgtctgacgctggctagggtcactgtgaggaatcacgcagatagtaaataggttccgaggtagtatagaagatattgagctgatagtaaaggtagaaaatgattcgaatgggtattgatgtcgcgcgatctctgtaaagttccctcgctagctttatatagcattattatgggatctatactaatatcacgcatcgctagtaacgtggaaattctcccttgaaacagttgatacgtcgaagaatgtactttgatatgactagagctcctagggaataatcaccactttctaggaataagatgagtcgggaaactagctaagttaaacctcttctacgcggcatgtactggcgaaagagcaagatgaaaagtccactgggtactttctgaagattatatatatggtgtcttccctctatggtaatatgcaccagctcacaatctgtatcttctccggtagattatatctaaacctcgcgattgacccgagacgcttttaacttcactttttcatcatgtctaggaatcctgctcatctacaatgggtattgggctaagtcttaggcgatcccttgcaccgtgagcggtgtatatgggtaggagatgataggaatcactgttgaaataccgtgccgcttgactcctggattaatggagtactgtgctttcagctgctctagagctctctgtccgcgtatccactagcgcacgagtttgccttggctgcaaagcagttactttgctttgagtgcagacgctatcgctgtcggctaaaagggtgggccagccaaatattggatatgttggatatgcgccgagactaagccgaagatgctatgatttactcggaatcttataattcggctagagtggtatatcaatggctaactagcattccctataatattgtcacagccgtgccccctaatgaggctttctcgaaaaccgaaagggaccttgtaaagaaataaaactagcgataaactcctccttggaatatttgggttggcctagggccgtgaaaatcgaggatccggaccttctccagaccacaagcggctttagttgtgttttgtgctatatgtcttcagtacaaaccgtggaatttatgaataacgaaagtcggttactcgtctacgcagtatgatcccttaagttcccttatgcacgagtttcgcacttaagtgccatctgaaagccctgtgttcttacacaaccgacccccaggctgttgctccccttctaggttgtggaactgaaaaagagtatggttccaggctgctttgtggatgttcgcggtagtggatctaaaccgatcaaggtctttttgtctcgtttttatgatctgttatctttattgggggcacctctggggatggggcggcggaccgtcgtgtatgttccaatttagaagcggcggtaggtgtatgtatctttgggagagattttgatcgtctgatactgagaagaaaagtatctttgaatttatggagctttcgcttaagcctctgaaatctcgaagagaaaattttccctatattactgtcaacgtgcttatagtgtaggaaaggaggatggcagttttgaggcggttgttgggatctaggaaataacgataatatccggaggcttatataacacaaaatcatattatagcactcatcaaatgcttttggtgcagtcactaagaaagattggtagcctagaagagctagtgaaatttacttctggtaggtccatatcataatacgagattgggttaccaacgttaattggtatcaatattatgcttaaccacaatatacctacatctctttgttttaaatgtattgcggttaaattaatgggttatggttcagcgagctctacttgatacctagtatgtatatatccaatgtatcagaggtctacttgtaaactgcctttctttaggaaataggtttggcaacgatcttttttaacgcttaagggttttattttcgtatatcggtgaagaatccggtgagcagctggcgagatccagtataaccagttgagctaactatttactggcttttcgaaagtgcggtcgatcctaggtggagaagcgttggtagagataacggtagcctcggcgtgacttgttagctataaagacccctaagtacaattcctgatccaatccatcttgatgaccaaaatggaccatcctacttcgccttccctaattgatcggccagctaaacgatagtgccgagtatcttaagctccagaagatggacccatgttggaaacccatctatagcaagccttaaacggtataaccatcgaacccaatgtctgttatacccctcccggcaggtaatgaaaatacctactaatactaaatagaatctagtgagaacacgtgataccctgacggcagagttcatgaaagtattaaaccttaatgcctcccgcgctataccggtccttaaattgcttgacttgtacttttgcctatgggaatgctatgtcgtcaaatcggcgtagaaaatacgactcgaggaggagcagcgatagctttaagcgttaaatgacttgctagtaagcgatagcgatatccttctatagctctgtaatgaacaggtattagtaatatgggaccgcaaatgagcggtgcaggctctttgtaacggtgttgtttcagccttggaagcgagcgatctttaagcctactctgttggtgagcctgagccttgattaagtccctagatggtagagcgtctatgggtaggaataacgacatttgatcttctaatagctatttgcgctatctccttaggatcaacgctagcgttagctaaggcctatactgctggtgcgcattcgttgggtttggtgacgggtgccaacggtgcacggctgttgatatatctaacgtgttcgataacttcatatatggctatgtactcccttagtttgtcctgatgttatgtaataagaggggaataaaatcactgcttagcctctagcttgcgattcctctaaacccacgtgaaattgctgcttatataccactgtattttttctgacgcattgagacagcgagctttcgacgaatatgaattcttgagcaaaatttgtctgtacccgttgtcttaatggccattttgtgctgatattagtagactacgatttggatcttaacctttacgctatctggtatgaatcctctagtatgccgacgacgcctccctgtcttgcgattaatcctattgatctgccgcaggttcttatagtaataataatgaatgataattttgaaccttgttaccttcggcgcccgtggctaataatatgaatggtcatatgtttaccccgctttggttgtaggtttgcttatttctgtcttcgcttttgggtatgataataagatcagttatttatactgaatgttaaagcctaaattgctttttttatgtgcttggccagtgtaaaccttagaagcttgaattcttcactttgatacccgggtctccttgtaatctcttcgagctctgtatataatgtccacgccttaaaacatcgagggtatagtatgctttttggagtttatctacgatcgttcaccgggccttgaagaatcaatataagagagagaagccagagagatcgataaagagtcacaattatattctaacgaagaggaactcgatagcgtctacggacctataggatactgcttggtgaagaggtagctcagcatgctatgataattgagaaccaaaaaataccttggacgttagattgtttgaaaaaaatcatttctatcatgggcctgttgaagcgacgtgctcaatcctatggcgagtggcctgagtcatcctgtagatcagggctgctaccactagaaagaagcagatgtatgaaccctattctgcctgcgaaggctgcgaagtggagcgctgtctagccgtggtcatgcttaaggtctattctaacgttggatcgttctaggatgccgttgaggaatagaaattatagtgacagtttggagtggtaaccgtttttgttacgctaacttaagtatatacctgagtatagagtagcgagtgattgtttaagatattgcaatggatacagagaaagagtgctcactacttgccgctggactgtatatcttatccctttggtactggtgtcctttctacttggctagcggtaagagtaccctccgatactccgcaaaagttttataggtgtaaacaactctcctggttggaggtcacgtatgttgcaagcggcctagtaggaacttagatattgttgaataacaagttgatctgcactagtgctaattcaaatatataagttaatggctgaagaataataagtgagtttaacgtagatgtagatagttgtggagtcgtcttaccgaccgatagtgaaagtctgttggtcctggtgagtactagggctttatcactgtttcttaggttctgttatgagttgcttgagaaacgaaatgaactctgtactgtatcgcagaagacttatcagtctctggcatattatttaaatatccttcagctacccttgtgcagctagtttagaccctcttcctacgccctataatctaccctgacaagcaatccggctagatggagaaatatggttagaatggttcgtaccacttgatttgatttaccgcctgtgcttatagcagactagattgcgatttcgatctcgaccttcacgcaatctggcacgagtctccctgtatatcgattccagcttaaatccttaccgcatttcatgacattgggctagattttcctaatctagcgaaacctgtggtatatgagccttaagaactgcttttggtcgaatgcttcttcctacctaatcatgagagccagtcgggctttaattggacgggtctggatcctctgtctttctttactctagctgacgatatcttcctttatatattaatgttgcttctctccgatgaggtatactgggtggagttccgacttgcacgattcgattaggtaaccggcgagagagtaggcgagtatatgtttttcctacttagggttgaaacgcttatggggaacttacgccgagtacgtgggcatatattagatattacctcctaagctgctgttggagcgatgatatcttatttccgattgttattgatacctcgttcggaagcactgctatattcgagccactcgatactttctccgttagctatgctacccccgatgctatccctggatccgttattttctgtatataatctctaggaaaattacagtgaatgagcctaggtcgtttaaacatggttgagaagtttgtatgtttgcctaaataacatctccgatgctcaccgccgcctgcagatagttgtaagagattcgcacgattttattgtaaggtatccggttagaaggttgatactacgaatggatagcgctacattgatttttataaatacttgtctcgattcatatagagctgttaggtactgatatgttaggctgttcttctggcaaattctctcttgtgtccttctatatccattaaaacggctagattaccgttcgaacattgattccagtcccagaaaacgcccatcacagacgacgagccgattttaagcacaatttatcttaaactagcgctagtccatcttataggctactcttttatacatatatcaccgcagagccttacagtggtaggacgaatgtttcgacataatcggaaatgtgattggtgttaatggctgtttgggctttacaagctgctggacatccctatctctattttaataataattaccatattagaccaagcttctatatagccagacttggtatacaagagttggaagaagggttattaacggttgtgataccttatttaagactgtgggaggccaaaacgcccatattgaactcaaccttacaagtgtctatttaatcaacaggctttccgtctatcaacgtcttatcattacaaacaaatctatataggcgcagcctaacgtagaaaatagcaatttatattattcaacgctattcataggaaggggaacattaactcagcgactcttttcactccataggatgaaagtgtgacaatgtgggaatccaaggatctcaatctttgctaccactgagccgattctattaactttacctagctagtcaatactccgtggatacctctagccggcatcctatgcttacatcccagagtctacatcccttatattcgaataatatatcgatcgtgctataaagtattataccgtttgctactttcttcttattccacaaccaatatttgcaaacatgctatttacaggtgggggaccacagataaaacgacaaatcacaaaaatatactcgtaaataggggatttagcgtttccaaacgacatacaaattccctgtaataaaattgtaatcgaagcccctggctctgtcgagtggcctggtataggattcgaccaaatgtaacggcctagttatcttttaggcctcggattacccggtgcaaaaacactaaggcggttgtgatggtcacttttaagagtaaacgggtctctcgattgatctagattacagctattgcctatcgcgacctgtgatctattagttcggatatctacctgccccagcgcctcacatcctgctagggtcacctttacctcctggggactttaactaaacacctacagccgcttgaggtaccaaagcacgatacccagaatacaccttatgctagtctaaaatattgcctttactagaatgagtgctacctagcggcatagatactatgaaaatactaccaaatccagaataataactattttttcggcggagaacaaatagaaagtttagacctcgttacaagccaacagtaggaaccgagcccggtttccaggacaaccatatgaactattctagctattaaagcctatagttaggttcctcgtcgatcgccacccaccttacgagattgcaacgctactatcgcactctaataataccttaggcccaacaagcagtcggactaatcaaataacacgcgggaatgtgaatgctagtctaattccgaggtggaaaatcctagcggccacccacggaacagtagattaatgaggtcttatttgtgctctataggaagaattggaaagatttacaaatttccagacgcgatctataagcctagacttgatggcctgcgaataaaatggatcttgatttttttgagaggcgctattgggccagggcaggtatttggaatatggtgcagactttggtgacagaatagaaggctgaatcccgatctgtggtgtcctcctagctcttacgagagtaagttcccctcttaagctgctctgtctatctgctctgtagaacgttctcgaaagtatgtatcttctcctacactaaccttcccctgatgaccaagctatctttgagccgaatacttcctttctatgtgccccaatttgatcgctagtctgataactctagctgacggccggaaaaaatgtacgctaattttggaagactacgtgagcttatgtaatcctattccgccctttgcattaagctaagataccgatcggctccgggatatggcagaagtcggctttgtgggccggcctatttgtggtccactatacagtgatggtcttgtataatatccacaatttaggtagaccgatattgtggtgaacctaccccggtttatgaagtaatctctcttgggacggtaggcacagatttcagtaatgccaaaaagtcagtggagcagaagcctaagctttctatgacgatcatttatgataaccgtattctcgcatggaacgaatttccttggtttatctaaactatgttatcaaaatgatttgcggttctacagttgattaatagtcccgctcgggttccacggcctttgtgacactctattttgttaaactatgagcttggtattccctcgctagtattataattttaagggatggtgattttcatatttcttgatatccgtgaagtgatatatacaacctctcctatacttatattttactgtagcttgtaatcttctgatatgtatcgggcctgtagagaggattcaacttcgccattctgactagacgacttcgctctgtggggatatagcgcttgtattaattagtagtaaaaacagatatttgaagccaattgcataatctgaatcccgtatcgttgggcaaggtgagcctaaagccccgctccctctaggtcccatttaaaagctaagatagtaccgttggttgatcagaagccttctaaagcttaatgatatgacttatggacccccctggtcagtgtatttggtaaatctgacttgtgaaatatcgactctgtattgcagaatccctcagactcccaccaatagaataaattccaaattctaagaacaagcaatttccaatttcatacttttacagaattattcttagatgtaaatactgtacgttaaaataaaaccagcaacaaattctcggaccaagccccaccgggtatcgaataatataacagactttagaggcaaaaactttatctttcggcaagtttccttcccctagaatcgaatacccttcatgactgattggttaaaatcgattccaaattgcgcggctaatcagaagtacggacagaaaacaatagacgttacaaaatccgatcgtaagttttagtttaagaaactaactctctataaagcctatatataaaggcctgtgcgacttctttaacatttgacatttaaccgtaactagggacactcgttttctcgttacaattcaggcgcaaatatagatagaatgagagaactcccaaattttaatcaagaatactttcgaagccaattgcaacgtacactatctatttcaacctccgggtctgagaatacacagagtccgtcaaggtctgcagcaggtgataccacagaggagtcctcttatcacgagaacgactctttaagcgacctacacaataccaactcagaacatcctccgcaaatctacagtataggccccacatctaaaggagagcaggaactactccgagaggctgatctatctagagattacagtatgatcgccttccactatatcgcagagtaagtgctgcgattccccagaaataatattttgtggtatggctacttacgacactcagactagatatccgaacaaagtcagttatacgacctaccagagaaagaacaaagctgatttagtagcaggactatacaaaatctattacatgaccagagcggctggattacaactattcgcagtgatctaaaggatatccgcagtcagttagcaggtattaagatatacaaaatctattacatgaccagagcggctggattacaactattcgcagtgatctaaaggatatccgcagtcagttagcgggtgttgagacagctctagcgataatggctagagggggggacgatactatagagagtgatgcaaataggcgaacgcgtcggccacagcagtaattaggatcaaatatgatgattaattttaactttcagggcctgctattagcccttattggccgagatatcatgattacattatgctttacgaccaaccatatctcactagagcagactcgggctctaaggatatatataactgtatggcggcggaatagtaggcaaattgccttaagatgaattccccctcaccagtggtagtcgtaaacagatacaaaaagatatatcattacagttattagaagttcaaacgcttagggatcattttagccacaatcctctccctagcccactggatcgttacagtccagtagtggatcgatttgagatatatagactcggttttatagccttagtagagtattcccaatcttatgacccaagatagcccacttaattgagtttcgatttataggtgaacgagaaaatactatatttcatactagaatcctagtcggtcgtttgggtttctattatctaccgagtagctataagcttcatataccaagggccgtagcggccagtaaatttcttcataaatagagagtcacatcgcctattaaatgataggtagagcccacagtcacgaggaaacagattcagttgcttccggatcagcgtataatctccccgggatatggaccctaccgctacgcccatagaaccttccctctgcctcccaagctacgctccgcggagcaaaagtctaattatcaaaagatttacatcaatatttcttatatagcagaacagcgatcaacatcaaccttacctctttatttttactggtatcataagatagcagcttattccaagagctatctctataggttaggtatataagactaactaggcggttcctccacaatgaatttagcacattcctaacccctaaatatatggtgtttcacacaagtgattcataatggtttcctagagctacaggctcctaggtcgcaaccggataatcacccaaggcgggaaacccgggtagggtattatgacctagagctccaagcgacccgtgctactcgggccaacttccgtacatcaccgcagagtcaggcaaatagggtactggtccaggattctgaatgttatcaatcgtgctcaagacccgagtagccgccgataccagctcgctatacgtctgatataagaccgcctgaatgtcgtgccataagacctgatcctccatagtagcgttcgccgactcctactgctgctgtatctagaagagctctttttcaaacctctcgttctcagccaaggctttgtctcttaccataatagattgtcatagttccgaagctccctaggccttttcggccagtaggcgctgaatcacctaggagtcataagctctctctttatccatcttcccaagtgctcagtcgaactcttattagacctagtccatcacatccaaacattttcgatagatcgccttataagctttcatctaggcgctttttatcacagaatatccctaaaaacgatcgtcaggtaagaagactttataaatagagagtaacataccagccctttgtatagcttggctaccggcttaagggggtcacagtctaccttagatgtagggaccgtcgaccgatcagaataaggcgaatcggtacacaatctgccagcacgaggctttactttagcagcaccacggcctgcgctattcccagaggacttagagttatgtgccataatggatccgtccgttcgagggataattgctaattcatataatacgccagacaaaccacatttgagtgcggttacctcctagggagcaccgattttaaaggcttaggtggggactaaatcaaaagatctgaaacgaggtgaaataacagttcgcccttaccaaggctttgttactagcatctggatcgtgcctattaggtattagcacgaaatgaaaaagaaaataaaaagaaaatagaagaaaagaaaaaggaaaatatggcgatccattatagggggattaactagggccgacacagaactacattcatctaatcagtggtatctcaatacccgctctatccaaaataatctaagcctcttatagttaacgccctcacattggtctatgaatagagtcgttattgagtaataacagtcatcctcgccctctacgcccttttttgataaacgtttacaaaatttacatttacatctacgtataactctcatattaaacagtaaacttccaaaagcccaggtcatcatctgtttagtatagaagtactttattataacagagttaggatctagattctcggaagctccaccatcgcccaaaccagggcctggtttcccggacaaccatataagccattttagctaccaaggcttatgaaactctaccccacaaaaattacaacgctactatcatactttataaggccctaggccacaagaagtactagtagcacagagaaacaatacccccgtaaatgtggaccaaggatggtacatacagttctacgatgaaaagctcagcgataatccatgggacagtagatcaaggaggttctatttatggcctagagaagaaacagcaaggacttaaaaaggcctagtacagtctacgatccaagacatgacgggctgtttgcatgcggatggaagaggtcctgtgttactttggcttactgaaagggccaccctcataggtacagtgggggcaggtataggatttggaataccatacagatttccgataacaggtcgacgacattatagcgactatactttaacacccctaaaggttgctactataggttagatttaaccacagttaatctagaaggtaagtagggcggaagtctatagaatgctttctgagttgaagcttaaatccaaatgattcatgaataatcacgtttttccccggccgagtatttccgcggttcatcaaaacaattcgtccatttgattttggtatttagctaacagtcaacggtcccgctcttagtttcacccttattataaggttaactttctccgataccttaaatccaagggtccttcttctagctgcactagaacatatcgttgaacatatcgttgaacatactttttattaaacatgaaacggcgtaaatcaatcgtatggctcacagctctagagtttagaccgccctacttccgacccaccgaaccaattcactatgctagaactatagactccaaagcttactccttcaagtcgataaaagtccagacaccatcataggctctcaggtagcctttattagctttcatatcataagctcataaccaggatacatatgtctttgttccatcaggcttaaataaatctagctatagcctccattctcaagttccagcttccttctactcgtggaaatccctaagtgagcatagatacagtcataaccagcttacccccgcaagtgggggctatccttatagagaatatctcaatcgttcagattgtgtccatattctcgatcggcgcgtacaatgtcttggaaatagggattgtcacattcgatacatttaagcgctaccggggcctgtatttctagagtatacaggttgcatcctggggaatccttgtgcatgcgcttcctgccatggcccatttcatttctcaagcatccaacctccccacagcaattcccttcatgatcagatggtacgccatggttaccggccaagccgttgtactctactcgcgtctatacctcgttatctccgacgcgaggaaggtgcggtgggtcctatagatgatcattaccaacgcttacatcctctatattccaatgaccgtcctttttttcggcctcaactacagcgacacacgcttcgcccatcctactgcgatatttgaccgggttcaatcaaccggcttctgcatccaagattttattatcagcggtatctacatatataaagcagcgcgtgctttcaagattatcattacactccgcagtcgcgacggccgcaacgccatcatccatctactttatatcaacattctcgtcgtgatcctgaacgttctactcctcctaacggagtataagctccactacgttcaagtcagtttcaagacggtagtatacagtatcaagttaaaactggagttttccatgctcaaccgccttcggttgctagtacatacgaacccttacatttgtcagcgtggacccgagggctaacgccgaccaagcgataggaatattttcggcaaggtttcttcacgatcacttaccgcaccagacatcagagttcaacctagtattaccgaagaagagctaccacaacattcactgcggccaggtaatatctatggataccataaagagcaagttgaaactagagttttccgtactcaaccgcctacagttgctagtacatacgaacccttacgtttatcagcgtggacccgagggccaacgccgaccaagcgataggaatattttcggcaaggtttcttcacgatcacttgccgcaccagacgtcagagttcaacctagtattaccgaagaagagctaccacgacattcactgcagccaggtaatatccatggataccataaagcactacgccagatatcaagcgatagtataatactccctgaagatgcttcctattcaggaacactatccgagggtcactcaagcaccccttcaagtagctcttcagagaccctacctaggctagaattaactctatcgcaattctcaccaaggcttgacgtctgagcatcccacgaaggaagcttcttactagcatcggacaagctggcggcaccttaatccaagccctccatttgaaaaaattttacacggtataattagtgaatcatacttcagatgatacggttctatgattgctcagtagatatcgtcgacatcgatatatcagtacgatagctaccaagagactcgcagattaagatagaatggttatcacgtttacagtccaataaagagcaaagcaatatataacgaattaagcctcgtatcatttacatcgaagcacatcgttccaaattattcgccataaccccatttattttcagcctacgcagcctagcaatagaatcgttattctgcctacaaaggactatcctagaagacaaaggtagctaccagggaaggttcagattgaaggaaacaattcttatatagctaaataagcacgaataactactaaggagttcgatttccttccaattcctactatacctttcgtttgagatacctaatcctagattttgctttagtcaatataatcagctgtgtcttacaataagataggttaatattttcatataggtctacaacacttatacgtgaagcatcaacactcggtcgacagagcaattataagggggctgttcagcaaagttcaaagaattatgatttacctcacttccaaacgaggagaaagtatagtagaagtctatagaaggtcaagttttcatatagagtgataaagggtaagtaatattagggccaatttaggttataaggtgcatcataagtttaaacgtccttcgatttatatacatttcggagatatatcaagctctagccaatcctggtataaccttttatcacatggaatttagtcggatttaacagaagaaggccatcatccctcctactatgatactcatgaagtaatcttttctttcgcaggcagttacattttcggcaaataaacgttggcctagacgtggttcaatagtatcggcaatcctaagaggtacataaactgcatacccatcactatggctaataactcaccgggaaaatcgaccgacgacacgcccaaacaatcgcttactttttctcctatgtttatcgccaacatggatggctgttttactagacagaatgtagacattcgtcttccttagcctagaagtattgttatacataatagcaacagcaaatatcgtccgtataagggcgaacctaaatttagtcccgttcccatcaccgatacagtcgacctcagggatactgactctatcacaggaaattccaacgatagcttatctgtatggctaccagggtgattaagctcacatatatatcggaacgtgagatcgggttctacagcattgagatatatagactagagtgtgcacatttatctggctgaatcgaaatcgcccgcgaagtacaaaatcctagtctaatattcgtgacctctcttattgattcgaaatctggtctcaatagtctcgttccagcaagggaatgcatctacaaaataatgatcgtatttttacccagttggtatgatcatatccagtaacaaataaaactccttacgttacaaagaacctagaataccgatacgtcaaaacagcgcgcaagttaagtcagcgtctgcagagtagtcgtacaactatcccaaatttgctctaggtatttagtcctaaaatacattacaaactaccaccgacggcaccatgcttaatctatcaaatatccgcccttagctttacttaagtactaatcacattgtatccaaacagcaaagataaaagatagggccgcaagatctttctcggcttggtagaccttcaaggaaagagccaagtcgacaccaataagtcattcgttcagcaacacacatagtaatatttgataccgtgataagcagtcttattagctacactaaccaataatttcaactcaccttcgcatgaccctcaggtaaaaatctcattctatcatattagctaagaatggcataagatggaatgagcttacctgtaagatttgctcaacggagacactttccagctaacaaggcagattttgaatttccggttcccattcgtacatacaattcttcaacatcaatttagtaacaacatcagctagagcgcataatttcgtcatcgcaggattcatttccaattcattaatttagcagctattctcgactcccactaaagaaggttagcctatctttatcgatatagactataccatcgggtgcctcactgatcctgacttcacccgcccgtataagcaggatggtttccgggcccagggtggcgagtgctcttccgagcccgcgcagatattggattccttctaatacctattcaatattagtctcaaatgtacctgcaagacaattgtatttaacacactggcttaacaattccaacgagttcatcggttgtaatagagcagctagaggctagaatgtggctcactgacacttccgttagttcccagattaacgtgcacaatgcgttatagtggtaaacttagagcaattttaagaagcttggataagagattccttccatcagttcttaaaaacctggggtaggagagaactgttattcaagttgttagatatacaccaactttcctctgttcatcttatgccgggcaaataccaaagaccgatcttatgatctagcagcaggctcgaaagtatcccatggattctagttaagttgtggaatacttgcagttgagcgaccaaagcgtaggttcgttaaaacagaggcgattgcagcggtagtcattatctagatatctgaaggttggatacccagagaggcagttggttttgaactcagctgctcatggcaggaagactgatccagccatacagtaggcggccggataggtttagcctgcttgcctttcatattactgtataggctttgcggtataaaaagacaaagtaagaagacaattcctaaggcaactaagactctttataaccctagaacatttcttcaatatatgcttttcttactcgtaacaatattttcaatagcaaactaataacattagatctttcccactgtatggtgaaataccgcaagtatataaaggtacataacggcccgttgatttaagcatccgtttccgttattaatgtccaaaagatagaataccgtcgtctatattagaaggtagtttatttaaaaactgaggttttgataagtctcatcgacgattgagattatgcggaactaatttaggattaattaccccctcaaatgtactgatactcggtggttacaataccaggattaccaatatgactttatttaccacataacatcgaaaagaatgtaggttctagtatacataaccattctgttcttattctagattatgtgataaggtatcccttttatcaatcgcagcaaccgtactcaccgctacggctctattctgcagaggatatcgaacaacaaaacatacatcatagactttcatcaaccattttgattacaaataggagcagatagcataaattcagccatctagtggttatgttatatttcgaaatccttcaaccggtatggtaggttcgatttgtatatgggtaggaatatgagctgctgtgacagccctaactgtactcagaatccaccgcataaatgtagggtttaccaaagtaaacggcagggcggcattctttcagacaagcgttccggttgttttcatgttctgagcggtcatcattatatattcgacaatatggtggttcataattatatcacgtacaataccttcgattcttaaaatggttaacctataaactagcaacctagattttcatcaggcttagtacttagcggttttatgccaccggaacttcgaatattcaaaatcagtttcaactccaatttctttttccttattacagaaggccctacttcaagtaaactagcccaccatatttccgccagactctcatacatcaatatatttttaatagatcatggtagattacacgtaatcccacagaatagttaacaattgcattcagcttccgcaattaacgtcaaaccctatcaacttcaactctcattttcgaacaatttttcaaaaaatagaaggacgagttacataatacctagtcatataaaaaatccgtagtgagatgtnnnnnnnnnnnnnnnnnnnnnnnnnnnnnnnnnnnnnnnnnnnnnnnnnnnnnnnnnnnnnnnnnnnnnnnnnnnnnnnnnnnnnnnnnnnnnnnnnnnnnnnnnnnnnnnnnnnnnnnnnnnnnnnnnnnnnnnnnnnnnnnnnnnnnnnnnnnnnnnnnnnnnnnnnnnnnnnnnnnnnnnnnnnnnnnnnnnnnnnnnnnnnnnnnnnnnnnnnnnnnnnnnnnnnnnnnnnnnnnnnnnnnnnnnnnnnnnnnnnnnnnnnnnnnnnnnnnnnnnnnnnnnnnnnnnnnnnnnnnnnnnnnnnnnnnnnnnnnnnnnnnnnnnnnnnnnnnnnnnnnnnnnnnnnnnnnnnnnnnnnnnnnnnnnnnnnnnnnnnnnnnnnnnnnnnnnnnnnnnnnnnnnnnnnnnnnnnnnnnnnnnnnnnnnnnnnnnnnnnnnnnnnnnnnnnnnnnnnnnnnnnnnnnnnnnnnnnnnnnnnnnnnnnnnnnnnnnnnnnnnnnnnnnnnnnnnnnnnnnnnnnnnnnnnnnnnnnnnnnnnnnnnnnnnnnnnnnnnnnnnnnnnnnnnnnnnnnnnnnnnnnnnnnnnnnnnnnnnnnnnnnnnnnnnnnnnnnnnnnnnnnnnnnnnnnnnnnnnnnnnnnnnnnnnnnnnnnnnnnnnnnnnnnnnnnnnnnnnnnnnnnnnnnnnnnnnnnnnnnnnnnnnnnnnnnnnnnnnnnnnnnnnnnnnnnnnnnnnnnnnnnnnnnnnnnnnnnnnnnnnnnnnnnnnnnnnnnnnnnnnnnnnnnnnnnnnnnnnnnnnnnnnnnnnnnnnnnnnnnnnnnnnnnnnnnnnnnnnnnnnnnnnnnnnnnnnnnnnnnnnnnnnnnnnnnnnnnnnnnnnnnnnnnnnnnnnnnnnnnnnnnnnnnnnnnnnnnnnnnnnnnnnnnnnnnnnnnnnnnnnnnnnnnnnnnnnnnnnnnnnnnnnnnnnnnnnnnnnnnnnnnnnnnnnnnnnnnnnnnnnnnnnnnnnnnnnnnnnnnnnnnnnnnnnnnnnnnnnnnnnnnnnnnnnnnnnnnnnnnnnnnnnnnnnnnnnnnnnnnnnnnnnnnnnnnnnnnnnnnnnnnnnnnnnnnnnnnnnnnnnnnnnnnnnnnnnnnnnnnnnnnnnnnnnnnnnnnnnnnnnnnnnnnnnnnnnnnnnnnnnnnnnnnnnnnnnnnnnnnnnnnnnnnnnnnnnnnnnnnnnnnnnnnnnnnnnnnnnnnnnnnnnnnnnnnnnnnnnnnnnnnnnnnnnnnnnnnnnnnnnnnnnnnnnnnnnnnnnnnnnnnnnnnnnnnnnnnnnnnnnnnnnnnnnnnnnnnnnnnnnnnnnnnnnnnnnnnnnnnnnnnnnnnnnnnnnnnnnnnnnnnnnnnnnnnnnnnnnnnnnnnnnnnnnnnnnnnnnnnnnnnnnnnnnnnnnnnnnnnnnnnnnnnnnnnnnnnnnnnnnnnnnnnnnnnnnnnnnnnnnnnnnnnnnnnnnnnnnnnnnnnnnnnnnnnnnnnnnnnnnnnnnnnnnnnnnnnnnnnnnnnnnnnnnnnnnnnnnnnnnnnnnnnnnnnnnnnnnnnnnnnnnnnnnnnnnnnnnnnnnnnnnnnnnnnnnnnnnnnnnnnnnnnnnnnnnnnnnnnnnnnnnnnnnnnnnnnnnnnnnnnnnnnnnnnnnnnnnnnnnnnnnnnnnnnnnnnnnnnnnnnnnnnnnnnnnnnnnnnnnnnnnnnnnnnnnnnnnnnnnnnnnnnnnnnnnnnnnnnnnnnnnnnnnnnnnnnnnnnnnnnnnnnnnnnnnnnnnnnnnnnnnnnnnnnnnnnnnnnnnnnnnnnnnnnnnnnnnnnnnnnnnnnnnnnnnnnnnnnnnnnnnnnnnnnnnnnnnnnnnnnnnnnnnnnnnnnnnnnnnnnnnnnnnnnnnnnnnnnnnnnnnnnnnnnnnnnnnnnnnnnnnnnnnnnnnnnnnnnnnnnnnnnnnnnnnnnnnnnnnnnnnnnnnnnnnnnnnnnnnnnnnnnnnnnnnnnnnnnnnnnnnnnnnnnnnnnnnnnnnnnnnnnnnnnnnnnnnnnnnnnnnnnnnnnnnnnnnnnnnnnnnnnnnnnnnnnnnnnnnnnnnnnnnnnnnnnnnnnnnnnnnnnnnnnnnnnnnnnnnnnnnnnnnnnnnnnnnnnnnnnnnnnnnnnnnnnnnnnnnnnnnnnnnnnnnnnnnnnnnnnnnnnnnnnnnnnnnnnnnnnnnnnnnnnnnnnnnnnnnnnnnnnnnnnnnnnnnnnnnnnnnnnnnnnnnnnnnnnnnnnnnnnnnnnnnnnnnnnnnnnnnnnnnnnnnnnnnnnnnnnnnnnnnnnnnnnnnnnnnnnnnnnnnnnnnnnnnnnnnnnnnnnnnnnnnnnnnnnnnnnnnnnnnnnnnnnnnnnnnnnnnnnnnnnnnnnnnnnnnnnnnnnnnnnnnnnnnnnnnnnnnnnnnnnnnnnnnnnnnnnnnnnnnnnnnnnnnnnnnnnnnnnnnnnnnnnnnnnnnnnnnnnnnnnnnnnnnnnnnnnnnnnnnnnnnnnnnnnnnnnnnnnnnnnnnnnnnnnnnnnnnnnnnnnnnnnnnnnnnnnnnnnnnnnnnnnnnnnnnnnnnnnnnnnnnnnnnnnnnnnnnnnnnnnnnnnnnnnnnnnnnnnnnnnnnnnnnnnnnnnnnnnnnnnnnnnnnnnnnnnnnnnnnnnnnnnnnnnnnnnnnnnnnnnnnnnnnnnnnnnnnnnnnnnnnnnnnnnnnnnnnnnnnnnnnnnnnnnnnnnnnnnnnnnnnnnnnnnnnnnnnnnnnnnnnnnnnnnnnnnnnnnnnnnnnnnnnnnnnnnnnnnnnnnnnnnnnnnnnnnnnnnnnnnnnnnnnnnnnnnnnnnnnnnnnnnnnnnnnnnnnnnnnnnnnnnnnnnnnnnnnnnnnnnnnnnnnnnnnnnnnnnnnnnnnnnnnnnnnnnnnnnnnnnnnnnnnnnnnnnnnnnnnnnnnnnnnnnnnnnnnnnnnnnnnnnnnnnnnnnnnnnnnnnnnnnnnnnnnnnnnnnnnnnnnnnnnnnnnnnnnnnnnnnnnnnnnnnnnnnnnnnnnnnnnnnnnnnnnnnnnnnnnnnnnnnnnnnnnnnnnnnnnnnnnnnnnnnnnnnnnnnnnnnnnnnnnnnnnnnnnnnnnnnnnnnnnnnnnnnnnnnnnnnnnnnnnnnnnnnnnnnnnnnnnnnnnnnnnnnnnnnnnnnnnnnnnnnnnnnnnnnnnnnnnnnnnnnnnnnnnnnnnnnnnnnnnnnnnnnnnnnnnnnnnnnnnnnnnnnnnnnnnnnnnnnnnnnnnnnnnnnnnnnnnnnnnnnnnnnnnnnnnnnnnnnnnnnnnnnnnnnnnnnnnnnnnnnnnnnnnnnnnnnnnnnnnnnnnnnnnnnnnnnnnnnnnnnnnnnnnnnnnnnnnnnnnnnnnnnnnnnnnnnnnnnnnnnnnnnnnnnnnnnnnnnnnnnnnnnnnnnnnnnnnnnnnnnnnnnnnnnnnnnnnnnnnnnnnnnnnnnnnnnnnnnnnnnnnnnnnnnnnnnnnnnnnnnnnnnnnnnnnnnnnnnnnnnnnnnnnnnnnnnnnnnnnnnnnnnnnnnnnnnnnnnnnnnnnnnnnnnnnnnnnnnnnnnnnnnnnnnnnnnnnnnnnnnnnnnnnnnnnnnnnnnnnnnnnnnnnnnnnnnnnnnnnnnnnnnnnnnnnnnnnnnnnnnnnnnnnnnnnnnnnnnnnnnnnnnnnnnnnnnnnnnnnnnnnnnnnnnnnnnnnnnnnnnnnnnnnnnnnnnnnnnnnnnnnnnnnnnnnnnnnnnnnnnnnnnnnnnnnnnnnnnnnnnnnnnnnnnnnnnnnnnnnnnnnnnnnnnnnnnnnnnnnnnnnnnnnnnnnnnnnnnnnnnnnnnnnnnnnnnnnnnnnnnnnnnnnnnnnnnnnnnnnnnnnnnnnnnnnnnnnnnnnnnnnnnnnnnnnnnnnnnnnnnnnnnnnnnnnnnnnnnnnnnnnnnnnnnnnnnnnnnnnnnnnnnnnnnnnnnnnnnnnnnnnnnnnnnnnnnnnnnnnnnnnnnnnnnnnnnnnnnnnnnnnnnnnnnnnnnnnnnnnnnnnnnnnnnnnnnnnnnnnnnnnnnnnnnnnnnnnnnnnnnnnnnnnnnnnnnnnnnnnnnnnnnnnnnnnnnnnnnnnnnnnnnnnnnnnnnnnnnnnnnnnnnnnnnnnnnnnnnnnnnnnnnnnnnnnnnnnnnnnnnnnnnnnnnnnnnnnnnnnnnnnnnnnnnnnnnnnnnnnnnnnnnnnnnnnnnnnnnnnnnnnnnnnnnnnnnnnnnnnnnnnnnnnnnnnnnnnnnnnnnnnnnnnnnnnnnnnnnnnnnnnnnnnnnnnnnnnnnnnnnnnnnnnnnnnnnnnnnnnnnnnnnnnnnnnnnnnnnnnnnnnnnnnnnnnnnnnnnnnnnnnnnnnnnnnnnnnnnnnnnnnnnnnnnnnnnnnnnnnnnnnnnnnnnnnnnnnnnnnnnnnnnnnnnnnnnnnnnnnnnnnnnnnnnnnnnnnnnnnnnnnnnnnnnnnnnnnnnnnnnnnnnnnnnnnnnnnnnnnnnnnnnnnnnnnnnnnnnnnnnnnnnnnnnnnnnnnnnnnnnnnnnnnnnnnnnnnnnnnnnnnnnnnnnnnnnnnnnnnnnnnnnnnnnnnnnnnnnnnnnnnnnnnnnnnnnnnnnnnnnnnnnnnnnnnnnnnnnnnnnnnnnnnnnnnnnttgataacccccgagccgatgaaaccagggcagagcaggagtagaagcagcagtagaaggtttctgttaggcagccttcacttcgatagctttgacacttgagcttcatgtgcttgggtacctgtggagacagacaactttggaccgatagtcgagctcaatttaggatagaagcagaccgagtggtttgacccagacgaagttaaatctatgacataggcttttcccacaaaactttgtatacgagtagttttaacagtttagggaagccatcctatataccaattccattcagagcgaaagagtacaatttgatctagatactaagtacagaaggggaaagagaaggagagggacgctaattagctggtacagggctttttgtgggtttaggtataaatcctgcaaacaggggataactcagccacgaagctcagggaatcctccaacttcaagtctatacagtgacaggtagcagaacacctagatcgtcacatatccatccagccacgagactccaatagaagccaatgctaaaggaagtagaagacatgggcttcaaacagtttctgtataacctgcaggatctggtattaaacgtgaaacagaaagtagggaaaatcataccgaaatcctggtaagtagacgacggaaaatcgtggtcatgcgagtatattagtcaatttatatagcagaaagatttccaaaataacaatagctcaaaaataacaatttaatgggataccattcataagcgaatgcacagataaaagtcatataggtctgtaaaagagcctatacagaaacggtatcaatcttggtttctaggcgctagggttgtcaatttttaggtaacaaatcctcatatagcaaatctttctttttaggccagggaggtaataggagctaaggaatttagacttccggcaatctatgatcaaatctgtgaaacgatacagcctgcgagctggcaaaactccctaactacaattcatcgcatatatataagtaactcgttaactaagagtgaggtgaccgtttgagtgggtgacatagattcctcatctttccaagtaggtgataacatcatattactacgggctaatcaactttacggtagctctcttatatcacaaaccccaccttaattgtttcgttagattacatggaagcatcaggcatataacaacgaccctttttccttcatagtaccttaatatttcgtgaacaaacagtataatcgcgctagcgatcttgattctaagcagcctactacttgcgattccagtggtataacccttttaccgtccgtattctaaacatactaagtatataccaggcttccagacccttaaaggcaatcatattcccaccagagctggtagtaagcaatgcgatttatatagctcgatatcgccgggacttgcgctaataatcttttgcaatttacaatatagacacctatcccactacccgcacacggcataaggcgagactacaatctgtctagtaagccaacaagtaagaaatgtaatacctctagaaatagtctatatcctgataccatgttctagtttctatcgatccaaacgcgaaacacggtcggctccaccaacatctccgggcacacgttacacgtaggtagcattagaaaacagtcacagggcgatggttattccgtttcatcgttactgctaggtcatttcccctattcaactgaagatagacattaagtttctatcttcgataactctattaggcctagcgttactaaaaatagaatttgaaaaacaatcaaaggagcaaaatggtgatactgagactattatatacaacagattctattgcctagctactattctgagctctatattcttgaggtacaccagggatctactgtgccctaaagtgaactaatcgaggacagagaatttatattgctacgagaccatacaacgattattctccaagtgatgcgccagagcttcccatttctggttctaacgagttggaggaca

SEQ ID NO: 67 - DNA, 89351 bp, Penicillium roqueforti
  misc_feature (21055)..(26782): n is a, c, g, or t
  misc_feature (30124)..(31815): n is a, c, g, or t
  misc_feature (36457)..(42376): n is a, c, g, or t
  misc_feature (65640)..(66338): n is a, c, g, or t
  misc_feature (74715)..(74862): n is a, c, g, or t
tagcacgaggtggtgggtaagtagggtcggaagaaggggtaggggttatgttggtcgatatgttcaagtggcctcgagtcggcccgtcgcaatggcgaaacgtatggaggcctgtactgcctctaggtttagcgtccacttctgatcatcagaaggctgttttccgcccaggaagaaagatatgtttcctcggtgagtctgcgtgcattgtaacatttccgtccggtacgtcatccacttccgacatcggaaaaggaagtactctacagtctctcttgcttgtccgcaatcgcattgatccgtctctactatattaatttgattgagatacccattgagcctagccatgccggttcggagctgggccagtacgctcgcttctttccacgttaggcaatcatacaactaccgggtgtatttgcctagcagtgcggcatctactcgttttacgtgtcttcctatgttctctggtagctcactgctagggactgcttaggaccatgcgatattcaatgttatcgacttcatcctcgagacgtattcttataggagagcatcttcttatattgcagttctggcctattctttagctagacctaacagcttgttatcttcggtagtagggatctagtggaactcgatacagtttccgttcttccgcaaccttctcatcaacttgtacatctaacaaacaaactcctggccagactattatcgggggtttcttagcgtgagcaccgccgccttattgcttataagcaacgtagtcctgtagtccttaattcctactatcattttcaacatatataccatagctgccagctccgcagagaacgggttctactctaccctcgcgcccaatatgatagaaaacgttttgagcttcaattttcgatttcaaggtagctatttctcgattgcgactctaaatcccaccagctcgttccgtgccgagctactaaccgcaatctatatcaacccgcccactttagtctggggttcatattgtccatcagtattggtctatacgcgttcgtcccatagggccaacgtgaataggtcaattgtttccagtatctctatatcgatatacctaagcgcatctgccacttagtacagtagcgagcgataatatcgtctgaactttctaatccagtctatacctctacagagtgggtttatttcaggaaaggtatatatatccgtccacattttcacagcccgtctccagaatcggttccgcgcggtggcaatataggcctccgcctccgctacgctagttacaacggtaaggaatgtccctacaatagcttatgctctaactctttagactcaattaatcggccccatagccttatccttacacacgtacatccagacattagaggcgtagtctataactagcgccactgtcgatataaataactgccgcgctgttactagggaaaggccataaagtcgccgaagctctatcgctacctctaggcccttagatacagccctcgccatatattccttatatttcagtctcgtatccatcaagacacccaggatcttaacgtgctctttagacacaaccgtctgttccttaatgataaacgacttatagtccaatttatatatcttaggagcaaagtgtataatagctatcttttccgctttaaaagttgctctacttctcctttcccaatcgagcgcctcattgataattgcctcaattccttaccggttactctacgcggttggcccagtcacccatacagtaaaatcatccacaaaagcgaccgctcctccttagctatcaatctatctttatacaaggtctatattaaagaaaaggaataggatcggagataggggtaagccctaaggcaggccagcttaggataatctttaggccttagaaagctgcccgttaatctagatagtagccgttcgctctaagtagaataccttaacctaccggagcaagtcatctaatatacctcgcgcttttatcctctagagcagttgttctttacacactctgttataggcacctttcacattgaagctaattaagcttaatacttgtcggccacaccatgctacatagatctactcttaaagaagcacaagcgcttgctctatagatcgctacttttaggtaccgaagtagctggtcgggagcaatccgtacgtttccactatatataagattctttcagtaaccactaattcgagtatctttcctagtatcgctaggagtaagatcggcctccacgcctttacaatagtataattttctttattcggcttcttaagcggtatgatcttcgtatatctctattatatcggtaacgcgccttctctcagtaatacctagaatagatcgagaaccctatgctagacagtcggccacgttatcttctagactattaccggtagaccatcttcgccgggtgccttctatgattttgtagcaaaaagctgtctttcgatctcttctataccaactgtaggtatcctcactggttctctctatagtctcgtcccctcatcttcaatcccctctagcagaggggggaagaacttagacaatagctcttctgcttactccttatagtcagcagtagtagtcctatctactctgacgagctacggtagtttcccaaacgccacattgtccccagacttcaggtacttagcggctttctagatattatcgttatctgcaagaaactcattctaatacttcttcttttacttacagatagcattataatattattttactacatcctaggccatcttttcaagctaaggtactttacaccctatccgtcattctaagcgagcgcgattgcgccagtatatatatatataacagagttatattaggtcggttatctaccaccgcttcgcgtatagcgatagtctcgctcttagagttaacgtatacactatatctaagactgcagacatcagttggtcggttttctgctatactatgccttccgatagagtaatggctagagtcctcgcaattctagcattaatctctttctatagcgcattctttagaagaagtcgttcctgatatttcagggctagctatagtatatcaaataccgtcttaatcatccggtaatctaagccgtactcagtcccatatattacgcatttagtcatcaggtctaccaaattatcggaggctaggataaggtcaattgtggactcgcagtccctatactatccttcgccataccatattttcgtgccttatttaagtaagctacttagagcaaattcactcataaggtcaatgattagatccgcttcaccttatcttcctaaggacacctcgtctccgccccagagttaatcatagcggttgaaatctcctataatcatgatattcactactgcacctatatctcgccgtaccatcgcaattacccttctcaggtgaccatacgcgtcatacagagccaaggaatctcccccttcgacgtagaccaatactataaagatcagccgttcgggtagtcggataaccgctaccgtcagatctagggacttaatagccacttactctacttctatatctttattaacctaaagcatactctagatcgcctatctgccttccctctaggaggagggtactatcttcatctatttataatatcccattagggtagtcaagagttgtccctaaatcctccttacctagggttcctaaattactaacgccactacatccttagtttattcgtcgtttattaagctttcatacacagcaccctacttcctcacattcaattagattattcgaagtattttattcataatatagtaggtagagcttccggcaattcttactaaacgacttatatggcccactgtatagaacacactttagaacctcttgatcgcagcgactgtagtaatgaccctctgaggcgcactttacatacttctaggtcttccggtattagaatgccttataaccaatctcctaatagttataacattatatcggtcgtagctgatatttaaagacactagttatcctagactcccctctaacgtagaagtatccgttggctaagagcctctatatatcggagcctttagtgaggtacacgaccatcgagctatatggcttcgcggcttccttactactaagccacatcatcttagcgactatactttcgttttctttactcagtactacagctactccagccagaatggcatagttattatctagcaccgcagccctcttaataccgttgaccttaatcaggtagagctcgtcccagagcacctaggatcttattccgatcttttcttctaccactttcttaaccagctagtactcggctttatcacaacacgcaatcctgatccgattggggtctcttagactcacggtaaccgcgcggcagcgccagtaggtataatcatccatcgttcggatctctttctcgattacagccctgattaagcccacggatatcttttcattttcattttcggtcatcttcgaggtaactatcgtacagtacaaagtttcggtaaaggtggtcggtattgtgcccagcgttaacagtatccatatattgcttaggtaactagttagaggagtgcgcgcgacatctatataggatagggaactcgtaggagcgggaacgctgatttcttcgcgcaaggattgaatctcgcggagaatcgcatcatagttgttctaagagcatgcctcagagtggcattacggtattaagggtctatcagtcaggttctatagcttatatcggacctcagcgagagtaacactaatctctacttgggcttttagtagttcttccttatgtatctcatcgcggagtctgatctccctcctaagtttggcgatctcttgcaccagattgctgacatcgaggtcgccgttggaggagtgcgcgcgatatctgtataggatggggaacttgtgggagcggggacgctgatttcttcgcgtaaggattgaatctcgcggagaattgtattatggttgttctgagagtatacctcggagtggcattgcagtgtcaagggtctatcagtcaggttctgtagcttgtgtcggacctcggcgagagcggcaccaaactctgcttaggcttttagtagttcttccttatgtatctcatcgcggagtctgatatccctcctaagtttggcgatctcttataccagattgctgacatcgaggtcgtcgctctcggtcgcggagttgtccgaagttgccacgttaggctggtctttgggttcgattctcttctttggtagcggtcgcgtcttcctctgctcgttatcgatctcttgctctcgagcatagtttttcggtggtttggtggtgcgtttcggtctcgacagtcgcggtggcgaatcctcgcgtttatcgcggtcgggcggatcaggggttcgcatcgcggcccgtcccgtcattactcacttgatacgggaggtcggtattttcgccacgtggcacaaaaaggctatcactgggcagttctctaaaatttagtacagtcactgtcgagtacagacgccggatgcgttctcgtcgctgtacagtctgtctccgtgaccctatacagtctctctttgatcctatgggactacagtagatttcgaaaacggcttccccgtagaacactcccggcttgtttctcggcccgtacccgaaaccacactagcccaatttcggactagtggtaagctaacatatattgtgagccaagcatggtcaataccaaatccaaattcgaaatagggtggtttcgggtacgggccgagaaacaagccgtgagtgttctacggggaagccgttttcgaaatctactgtactagggtaatgggaccggaattcttttagtcccataggagtagataggaccaggatatgggaccaaaattttcttagtcccatgggagttggcaaggtctagctaagacctatattttatgcaagaatgggttcaaatgggttgttattgggttattaggtttaacctattgggttttgggttctgccgaagtctataccgatctagttgaaaaacttctaccccctaccacagattaaataaaatagataaaaataagtgggtctcacattcgagttaatacatagtatgggtaggtgcaaaagataaaataatcataagtttcatcatatagaggttccagtatgtgcctgtattcggctaatagataaatacatttgtagagatctacatatcactgaaccatctcatacattgttgtacccagtatttctgtcagtataggtaagcaagccaaatccgacggtccactcaacctactccaaatccgcacaggatttgggatactgtagggcatgcttaatccggctgatgagcttctcaccatccacctcgaagacatagttcacctcccggataccctggggcgcaagtgccttctggtacacatggatgtttccatagctgggactgccatacgatgtgtccacatccagatatacttgaaaacgttagtcataatccatggcatctttaatctaccttccatatgacatacctgaagtctggttgacagagatagaagggtcgaccatcagcgcagcagctgtttcatcccagaaaggcaatgacaggtcgtaatacttatagaagagctcgctgtatgggtttggaaccgagtgaacctcttccaagaactccttggtcgggaagacttggttggcaacattcccggcgatggtgatattggggaaatccgccgtcagggctatcttagaagcttccgggtcgatcatgagattgatctatattttcaggagtcaacaccatcataggatcattcgaagaatactaacgtcagactggtgatctgcaagcatgatacttccagtggcctgaagcatgttcaggtcgacataccctcccataatcacaagatccttggcaagtgacgcaaactgcgggtccatacgcacagcaagcgcaatattggtcaaggcgccggccgagtatatggatacctggccgggatacttgtgcaccatctcgaccatgaagttagccgccgaggtggagctttccggtcggcccttcgggaagccttccttgaaagcttccttgacgatgcggttcggatcgccagaggtaggatcattgccctcagcctccagagtcttattctcgggcgcaaaagcaccttcccagggcagtttgccatggatcatctcccatgctcggaagcggtggggggtattgatcagcggccatgtcgcacctggatagactggaatacagctgagattcccggcctctagggttgccactgcgtgcaatgcgccctgtggctgccagctgttggcggtatcttaaagttacacttagtgaacaattgcgccaatgcagtaaaatttagatacccacctgaggccaagcctaggatttccacatcgccatcaagagcaaccaaataaggtacaaagcccactgtataccaatcattgtccataatggcatagtgcctatccgtccgccccagcgcaagcgagcccgtgacgaaagtaagcattgagctgcagagcagcggaaccgaggtcgaccaatgcattgcagggatgaagcgtagtcttgctgaattgaaagaagggaatatacaattccgtatgaagcgcagaatcgatttcaagtaaataaaccccttcacccccggaagcctttatacctttagattccatcttaaccccagagttccccagagtttcttatccaattgtagtcatcaatcagcatggacacaccaacttagagaagcagtggctacggtttcccagaatggacgttgtgtctggaccaccccacaatttcactgcagatttaatgtcggtttagggccgagtgggaccagttaagccctcacagttgggctaaaccattcagggccccaaccctctccgaatttaccctacacattcccatgaataggtcgatagccggattattttaaatggaaacatattggttcgctattactccattctccgcctcgggtaacacatcgaggtagcccgatatcgtcatgcttcgctatttattccgactagcttaatactgatcactgacgattgatctggggtttccaaaatacgaacgactgttcttataccgagtatctggcgtcctacgaccaccgacaaacggaatcagagggtcggagaaatcgacactcgggactgcagatgacggtatactctagaatttaataggacgagggacctctgatgggtcatcatggccctctgatgaagactgtcgtccgtccagagagaaataggcatttcttcgagacgcgtctagctcccggcccttttttatttggaagttgcggctcaagtcatccacaaattatgcactattcgagatcgatttactgtgatggtgctataaccctcccaacggccttaatcccgagcgaggtggcacgaattgtcctgcactcatcacctacatcaacaagtcagtcaataccaagaaatcaagatcagtcataggtgacacgtatttctccgtttctgacatgtcgagcatctgttcttaacccattttcttggctgctagcgtgggtctccagggcatgctattcagatgggcactgtataaccttagacgaacgggatatggagagaaagaaatgatcgttggctccgatgtgcggtcaactgccgaagcgggcgctgattcgggtccatcgtggagctaacccaaatcgggagagtcgagccgaaacgcgaggggaaaaccgtggaggaacccgagcgctaaaccttttcgagcggttcatagcctacaatccccagaacggtcaatgtttgaatctacaagctagtagatgagatcatgaaacatgaaacacaatatgatgatattgtggaagctgtagagctataaaagaggaaggaaaggtagatcttgagagtgtactactatgggcacagtcgtgttgtggtccctagcgggctccagggccaaatacatatgacctttgcgccaacgcccctctgcggagcgtaaacagcagacttgcaggttgtaccaccgccaatgaccaatgtagggtgagttgtcagatgaattttgattttgggatctgcatggagtgctcgctctattgtgctccagtgtgtatttgttccaatatacagctgcttctcctcgcctctgactagattcggttgaacgtagtttgtgatcgttgaagtatctgttctcggtgtttttattggttggctgatggcagaggggtgtctactacgtccgatgtgaaagtataaatcattgcagcagcttatagatatctttaacgtatttcacatgcgagctggacacccccagaacatgcaaatttagataagccgagatctaccgatcgtaagtagggagtgagtgggcactcaccttggtgctaaatgacagtatcgcgtagtccgagatccagaagacgagccaagattgcaaaatcattcacaacaaacttcagatcgtaaaacggtctaattggctgtaatggggttatttttccagtgggctgttggcacttttgtctctattggataatagtgatagtgatcaacgcgatagtcgggagagttagtcaagcctcacggcgttgaggtttagaccctaagtattcaggtccatggcctgaacctctacaaacatggtatctaggcttagtgctcacagatcggtcggcgaggtatagatgttcagactcaggaataccaaggtcatgtaaataactaacttcaaggaatctagtctccgtcgctcatcattacctggcggttgtctgttttggttatttttctgctaaccggattgggagcacccaacagattgccctcggtctagttaccctccgatatacaatcgcaattactgaattccattcacccagctgattgcattacatcaaacctatatccgcataagcaactagcatgagccgatgctggctcgttacctttcttgcgtagcggcccactcaaagctggcagggggtagtcggtgtggtgaagtggcgctccagaggccagcttataagcgaaccctgagccttatcacattgtacagaactcctttcaactcgaagatctgggctatggcgctaaccgggttgggcacgccaacctgggtgctcttgatctggttagtctctaaaatttaacctcatatactatatagcctgcgcattggctgggtgcataagtctttaagttgccgatatcttgtgatataaatcataagcccctaagtagaaagaatccctatgaatacgattcttttaatacgggcctgcaattgaatatgaaaaagctcctcttagcagcaatcatgtatcttaagctcttgaaacgggaggtaagatttttatttcgctctaaggaagttgttaacttgaccagccctgagacaccttccacatccagcactaggatgacgcggatcacccgcgacaatattagtccagatccagttagttattctgtaaattttactaatctatttccgatacatacccacaaagcactgttgcaattggcttggttccgggcactccgcgccaacatccgggaataggtaagagaagtcaccgttcgtatagatcatatagatctatgtcgagtcctgcgacccccttcccccctggagagtgggacatgacaaagatgcccttttaccgccttcgtttacacctaaaaagagtatccaaaagaccaccaaaaagacatcgtagaagatgatacaattgtcatacgaggaaagatctaatacctaggcacgaaattctagtgggaaaccataaaatttgctaggacttgcaagcccactgacctggggctcgctctcagggacctcatcatatttcgcactgtggtgtcccgaactgtggtgttccgtgccatggtgtccccagccgtggccatgtttccgcccatgacccctggcgattccggtaggagtgccgctcgggattgcactgacaacactgcttggaattgcgctctgggcatcagtggggacttcgctcaccgcgggaaccccactgggcccactgggggtgtcgggagtataaatagcagtggcagccggaagttcactgtctggtccacttgcaatcacatccacaatgccactggccgcggagctggtaacggcctttgcgacttcgatcacagaactgctcgatggattcccaaatccgcttccgatggcggcgacactcccacttgtagccttggctgcgggctcggtagtctggcttatggctttgattgtggttgcacttgaagcggcttcggtaatctgggttggggctttgacggtggtctcgctcgaagcggccttgatgacggcactcgcaccctcagtaatggcgacctttgcggtcgcgctggtggtgacactagcagccgtagttgtcggggaatccgttgcaccatcgcggcctacgcaagcaatgctcatctttttgccagtcgcagaggacgaggagtcatcaatggactgcgagaggtcccaagtcatgttgacatagggccagcaaattctaccatctgacatagtcaccatgtcaccagcaacgtaaacatcgtcagcactgaaagcttgaccaaccttggagccggtggagtcaacttgctggaagtaagttccagcaaaggtaccacggcaccccatggcaatgaagtcacaagtcaggttcgagatttcctcccaggtgacgagagcattgctacttccaaaggcggcagcgtgagcgtttgagcaatcgttcgatccagagttcacccagttgacctggctatctccatcctcggagccgacctcagacgtggcctgggcgccaaccttggtatacttatcagagaaaagcgaaatagcaacattgcgaccgttcgtgcggttctgcacattcgtgtagccacttcccatccaggcgttctctgtcacatcaatcgcgccgcgggaaacccaggcgaagatatacttggtagtatcggcaaaccgagccaacgcactgtagctaccagacataccacccataggctcaccagacgcgccgtttgtagtgttctcgttggaaattttgactccatcggtggacattccttgcgtcttggtgttcaaccagatcgcgtagacaattttccaagcaaattcaacagagatgatttttgattggtaatttcgcagtcatcaggtcgacctttttttccatttacttatacattactcacggctttgtctctaacccgtaaaattgagccggtccagcgaaatgtttaccggtgcctgcgcgcgcccgcagtttcttgccggccctcagttagatgagcacggccaggtgtaaccggcagttcaaacagctttgccctcagtaatacatccttcacttgagtctagtacagagttagaacagttcaatgcgggtttgtttattgtgattctagtcgcatggttgaagacagctttttttgcgatggccaatggctctccctaaaaaaaaaccaatttagcgtgatgcggtagattggcatataatatataaaaaaactatttcctcgacttacaatggcgatattcaactctctatctttctacctgaatatagaggaacactgaatccttcgagcccaatggacgctcctgcttcccactctccttcgggccggactaataaaagaaagcgaggagcaccagatccatataagaagccagtagggataccaggcagcaccaagcaagtgacaaaggtcagatttcactgagtccgtatttgatcggctctaaccaaaaaaacagacaatctcgataggtgcggtatattccctaaccagtgatttgaccaaaatcctacaaaaaaaacccgctttagtatcttccgctattaacctcctagacctctatttatacctgtaggagtattacatgatcaagtccgccggcaaaatacgcttagaagaggaacatcgcttcctacaaggctctaacaaatggctggtaggagagaatgagaagctccaagaatgctataataaccaggagctgctactgtaggatcgtcgtcaggcctttgactctatatatcagggtattctcagaacattgcagaatagtaatagacgctattatcatataaatgagttacagtaagtttttgcttaagcgaaataagatcggcacgcttaacctggctatgactagtattatactggtaggcaacagagtgataaataggtctcgtggttcttacgttaaacagaaaaggcaggtaataaactggtcggaaaggatagttcaacggggtagagtataggtggggcgttctataggtggtatcatactaccaatgaatgtacttttaacacaaaaacacaaatcgagtaccgtctgtatctatatgaatcaagaacaaccaattactaacacacagggacttttgttaaatatagctaaatatctggttttgtttggtttttttcctgtatttacaaataaacgccttactaccccctaagtactaaagctctgcgctaaaccttagacttacttacctgtcattctggcctataaatataaatctctaataaaaccacagagattttctcactctctaaacctaccttttcttcgcaaaccactttttattgtacaatctcacatactacgcagaaagaatagggcaacttaatcaacttggttagttgaaacatcttcgatagctagtattagcgctgataaaaccctttagacttcgatttagatctagaccttaagtcaatctagagagaatcgccgaatataccgataccaccaccttatctcgcagccaatcgcagcactctcagttcaatccaacctattagcatatcataatatacaaaaaataaggccgagaggcctcatgctatcgagtacattttctaccctaactataatagcgagtgcgcctttagctagacggggccggatctgttatccctagacacctatgccgatgatattttcctctacgtatcagcattctttctttttgaacgggtacactagatagaaatccggcttagtaagcttagcacaggaaacaaagaggttgtagaagagtatccgttctttcttctgtaggttaaatcgatattagggaacctacacagagtatgtggttagatacataatatcatctcgcggaatggctatataggaagtactggggaaacccaatttcaattatctttacgaccgtagatagagactgtagcagatcctggcatatagagcgcgattcctctatcttacatccatccctctctacctatagcatcgtttgatccacaattctttatacagaatattgttaggaactagggaatataagtgctctggctcttagatagcctaatatcataatggggtctattttgacccttctatggctttattaaactaagataaaggggccatttagatttgcagatttttagataataatcttaatagaataaaatatagataaccattgcgtttactaaatgatatatactatcttttgtggttatcttttcatttataagaagccctaggtttcctataaccggtgatatataaataggggcgtattatgatatatagtgttagagactgcgggaaatcagcgcgttagagatattctgtaccagaaataagtcggtgaccagtgctatagcgatcatcggtgcgagtctatttatagattgtatggttaataaagaagcagagttcgaatggacccatcagaaggacaggaactcacagcagttgaacgggtttattctataagctacgtaatacagaaacattgagtgaaatatctttttttttttactgttatttttctgctattacgtcgggcatgtacagaagatgattataacctataagcctggttacacgtttattgtatctggaagatctattataaaatagttatagatatttaagtaaccaaaccaccggtatagtggtcatttggatatattttagtactcctgtaacgctacctaagctagtttataagtaaataagaactcagttactctctatactactttagaccttatcctcataataacacagtttatatgggccatttgacttctagggtactcctctatggtaaattccttattatagttataaggaacgtttatctattttctagaaacgtatataaggagtaagcaggaatataagtaatacactttttaaccaaatacatatatcaagatcctaatctcacagtgcattccctcctcttagtattttccttattcttttcactataagctttcgatcatatactaacccacacatctattctaaacttcatattactaggacctattgtggccctatttagccacattccctttatcatagcttccttactcctaaataaatatactactacagctagctttaataataaccatagaaataggcttattttctgctacttcatggcatggcactccagtatcccctattgaatcgtgaatccaatactaactctcattaggttggtatcgttagtaaccgccagagtgctagcaactataacgacgatataaagtgtgcccaatatataggcatcgacgctttcgccttgaacatcagcactgattcttatatagacgagcaactagggtttacatatcaatctgccgccaataatggcataaaagtattcatctcttttaacttcaactagtagtagactagttagggtaatacagtcggcacaaagatcgcatagtatactaatctacctacccagctcaaggttaataggaaagtatttgtgtcttcgttcgccagtaatagtatcgatatcgtagcgatcagagtagctaccgacagcgatatatattttatacctaatttccaccccagtcggggtgattttagcaaccttcaggctactctaaactggattgcgtagggaaataatggaaacaataggtcttcaactcctagtaagcagctcgctattaccgatagtaataatacttacaatatagctcttaacgggaaaccctatatcgcgtataagtggctcgaataaggtattttttcttcttatgctaattcaaaattagcggtctcgccttagttcttaacacatttcggcggcgaagtctcttacacgaaaaactgggtatttccctctagactcctgtggtataaccgatagagagaaattctagctactagtccttacttcgtagagcttctcacctagaataactacagcaaatcgtactacattagtccgctattatcgccgtatatagataacggggcctctaaataggttataggaatataagcagaactctcctaagaagtataaggggcgacggcgaataatataaaaacaggccatataatggctggcttaatatggcgaagccttttatagctgcctataaagctggcttaaaactaccaatctgtttccttaatgaagaaaagctagtctactagtaccgaacgacccctaagaatatcaattatgatataaccgatacgataatataagggtgctctaacagctagagtggcaactttatctgtggacgacctaatggcgtggataatatggccgacgaggtatttatcgtaacgatactaaagtctcctgctaccgtatatgtgcagtctagctgcgaggctaagacttataacgctaaggccggaatatggtcacactctgtgccgataggtataggtagacagagctttaaggttgtttgtgaaggaaagacagttaactctctgtataggattagtcggagagatattactaacacatatccctatagtatctacaatttcaatgcttatataggcactctaccagcggaagcctctattaaccggctgtagccggctagattagcactattatcgcagggattgcagattgcatatccgactacactaggtaccaggtaaaagaagtaatttaagtattactgtactcttgccagattctagaggatattaattccttaaacagtcagttaaaagacttcgtggctcaaatatctgacaatctgctttatctttaataatacaaaacactatttccctccgataactgcttgcctatcaattacattgccacagaattacggatctcggcagaaaagttattaaatcaagaaaacccactgtatatatagacggttcgtaattaaaattaaatcaataatattcctatactattctatatatcgcctagtttcccttagcgttaactttaaacaaatatagacatcggactaattgagccgctaactgtaaccaattagtaactatcgcaggtgattctataggtatcaacatagtaaatgtcgtcctggaagatatataagatccagtaccatacgtggtatatattacagtgttccctaatttaatatggcccactcgattatagatatacactaggccttagcgataggaccagagaagagttattatagtaagaccgattgcaagaatgtctacctaggcttcgatgtccctaaacgcgttaataattgaatgaccagtcggtctatatagggatcattaactcccttaaagatatataccatctccgcttcttcagatattagaatctgagggtcaatagtaaaggtttttttcttaatacctgattacaaaattgctttaagtcaattttgcaaaaagtacagtgtaatcccggttcctacctaaggaatactaaacaacctactatagagaacagagttgtttatatttatatttacatcatggtcaaacgttcaagtctattccttaaccatatatattcggtaccgcaaggtcatttcagtaagcaattttctctatacttcacagtaacagacttatcgataatctggtatttaaatcattgaaaaggccaaatcaaaaatgccttaataggataatataacgttatatatctcttatgcctacagcctacttaactattttcagtacccacgcgtataactataagctggttccttagtactaagttataggtgtatgctaagtatatcagagtttgataatccatatacattttcggataatactaatatactaagcaatagggctaagagatcttttcgtctattaaagtcgcctctaagtaggaaccgtctactaactcacatagtacgcaatatactaataagaagaaacgcggacaacaatctaccagaaatcaggccgcagattagctttctttattactagctttaccatggtcgccgatcatcattatatcataaaaataactcagaagatccagaagcattccctctagaagggatctacttgtaaaggcgaactaaatatatagtaaacaaggccaggctctaagcttcctatagaatactccctatgatacataaactaccggtagataagatagccaactatatagtaagtttactaataagctccacgaggtcaaccagtcaaccaaccattaagctaacaccgtgctagccataatattactctaattaaaggtaggcggagcaggtccgaatataaatacgcgtaagcgaagcgcactaagggcattaggattagggtggattattttatatactaaataaagctactagaagttaataattcggtcattataataataaggtttctatatacctaggctaatatatttataacctacttcatatggttgcctatctaaacacttccggtttacatatttacttcctcagataataacgattgtggcccctttctgtctgcgcgaaactgtcgtacttattcaatttaattatcctctcctataactgttagtagtagatattagtaatccccaattgtagactagatactatcgggcaaatcttcgtcttcaccccgtgtataaaatatatcaagatcgaaaatcatcagtcagagatttcttcctatatagggttaaacagtcttcgtaacagccttatatatcgacagactcgtacacactatacagcagcttatcagtaccataacagccttccgcttctaacctataataggaaatgagattagaatcggtaacactcacccgccacagccacagctccgcattagttatttataagtcgcgcaacttcctcttcaatattaaccgagccataaaagtaccagagccactcaccctattagtaggaaatattttcttcggggcctgattaggtatgtaggcagtagatactgaattataaaatctagagcttagttagattatatcgcctaggataaattgtgcttacagataacttatacaaaaccctttctaatcgagatagaatagctgttctatctatttatttacctactttagataccctacgtatactatattagtaaaggcgatccctaggctccgaaccataggctaaacgtagggacataccatctatgccaactcggcgcttctagagaacctctaacttctgtaccattacttctcacttataactggcttatactagtatctcaatatacgatagcgctcgaaaaaatccaatatcctccaccacaaagaggattatactgaaccgatagaaattaagagggtatccatagggtccgagtataataaccggctacctactcaggaattctagtacgttatagtataactttcgcgtaagcccaagttaaggctcagctactatatataccgttcgttaaatcggtccgtcttcctaaaacgtaatatagaaaataggaagctgaaaataagtacagaagctagcccgtggtatctagagctacacgtactagccagggcggatcggttggttaaggggtagtgtgatattaatctaaaggaactagctcatagagtttatggtcacctcattttgagaagatttccaaggcttctggttctatatagccaccatacagataacggcgctaatagaaaaccataggcaaatagcgcccactaagtaccaccgatacaatgactatcgctctataaggtggtatataagcgcgcagatcgcggttaccataagaagatagtagcattttattataaactacatataatgccgttagactgccgcacaagtcactagtatcataagaataagagcagatcctacctacattgagttagctatagccacctatataactcataaatacagctctacagatagtaatatataccgctattagaataatataccgtggatttataaggttcgtcgttctagtaatactaacgagcagcgaatagtgcaatagagaatagagcatacatatacgacctacctagcgatagaaccatataagcatataacggtccatatgcagcagatctaccagaaaaccaaaagtcatactggtatataagggaatgaggttaataactaccaaagagccagctcttttctatacttccctctaggaataggtttacaactaaaggccaataatatttaccgcaagcatgacagctaacactagtgcttactagtactaggagatatccagccagcttataccctttagtaggtagacgtaggtaaactgccgccaggagcctaacattttcaattagaaggggcgataaaagcctatatagcatctcccccgcgcccagccccacatacctcgtctaagccaatagatcaactatattaataggacggctgtagcgctgatagtatacaagttagggagagaggtgctagtaaaccattgatataagtctaacccaatcgggggcattctatttagttattgacggaaaaacggtggtaaggcgagtgtattttgtggcagaaaaatcttaataaattctctaactctctaaaactgacaatagtcctaaaacatgacaatctgatggacaacttagtaatcaaaacaaacaaaacaannnnnnnnnnnnnnnnnnnnnnnnnnnnnnnnnnnnnnnnnnnnnnnnnnnnnnnnnnnnnnnnnnnnnnnnnnnnnnnnnnnnnnnnnnnnnnnnnnnnnnnnnnnnnnnnnnnnnnnnnnnnnnnnnnnnnnnnnnnnnnnnnnnnnnnnnnnnnnnnnnnnnnnnnnnnnnnnnnnnnnnnnnnnnnnnnnnnnnnnnnnnnnnnnnnnnnnnnnnnnnnnnnnnnnnnnnnnnnnnnnnnnnnnnnnnnnnnnnnnnnnnnnnnnnnnnnnnnnnnnnnnnnnnnnnnnnnnnnnnnnnnnnnnnnnnnnnnnnnnnnnnnnnnnnnnnnnnnnnnnnnnnnnnnnnnnnnnnnnnnnnnnnnnnnnnnnnnnnnnnnnnnnnnnnnnnnnnnnnnnnnnnnnnnnnnnnnnnnnnnnnnnnnnnnnnnnnnnnnnnnnnnnnnnnnnnnnnnnnnnnnnnnnnnnnnnnnnnnnnnnnnnnnnnnnnnnnnnnnnnnnnnnnnnnnnnnnnnnnnnnnnnnnnnnnnnnnnnnnnnnnnnnnnnnnnnnnnnnnnnnnnnnnnnnnnnnnnnnnnnnnnnnnnnnnnnnnnnnnnnnnnnnnnnnnnnnnnnnnnnnnnnnnnnnnnnnnnnnnnnnnnnnnnnnnnnnnnnnnnnnnnnnnnnnnnnnnnnnnnnnnnnnnnnnnnnnnnnnnnnnnnnnnnnnnnnnnnnnnnnnnnnnnnnnnnnnnnnnnnnnnnnnnnnnnnnnnnnnnnnnnnnnnnnnnnnnnnnnnnnnnnnnnnnnnnnnnnnnnnnnnnnnnnnnnnnnnnnnnnnnnnnnnnnnnnnnnnnnnnnnnnnnnnnnnnnnnnnnnnnnnnnnnnnnnnnnnnnnnnnnnnnnnnnnnnnnnnnnnnnnnnnnnnnnnnnnnnnnnnnnnnnnnnnnnnnnnnnnnnnnnnnnnnnnnnnnnnnnnnnnnnnnnnnnnnnnnnnnnnnnnnnnnnnnnnnnnnnnnnnnnnnnnnnnnnnnnnnnnnnnnnnnnnnnnnnnnnnnnnnnnnnnnnnnnnnnnnnnnnnnnnnnnnnnnnnnnnnnnnnnnnnnnnnnnnnnnnnnnnnnnnnnnnnnnnnnnnnnnnnnnnnnnnnnnnnnnnnnnnnnnnnnnnnnnnnnnnnnnnnnnnnnnnnnnnnnnnnnnnnnnnnnnnnnnnnnnnnnnnnnnnnnnnnnnnnnnnnnnnnnnnnnnnnnnnnnnnnnnnnnnnnnnnnnnnnnnnnnnnnnnnnnnnnnnnnnnnnnnnnnnnnnnnnnnnnnnnnnnnnnnnnnnnnnnnnnnnnnnnnnnnnnnnnnnnnnnnnnnnnnnnnnnnnnnnnnnnnnnnnnnnnnnnnnnnnnnnnnnnnnnnnnnnnnnnnnnnnnnnnnnnnnnnnnnnnnnnnnnnnnnnnnnnnnnnnnnnnnnnnnnnnnnnnnnnnnnnnnnnnnnnnnnnnnnnnnnnnnnnnnnnnnnnnnnnnnnnnnnnnnnnnnnnnnnnnnnnnnnnnnnnnnnnnnnnnnnnnnnnnnnnnnnnnnnnnnnnnnnnnnnnnnnnnnnnnnnnnnnnnnnnnnnnnnnnnnnnnnnnnnnnnnnnnnnnnnnnnnnnnnnnnnnnnnnnnnnnnnnnnnnnnnnnnnnnnnnnnnnnnnnnnnnnnnnnnnnnnnnnnnnnnnnnnnnnnnnnnnnnnnnnnnnnnnnnnnnnnnnnnnnnnnnnnnnnnnnnnnnnnnnnnnnnnnnnnnnnnnnnnnnnnnnnnnnnnnnnnnnnnnnnnnnnnnnnnnnnnnnnnnnnnnnnnnnnnnnnnnnnnnnnnnnnnnnnnnnnnnnnnnnnnnnnnnnnnnnnnnnnnnnnnnnnnnnnnnnnnnnnnnnnnnnnnnnnnnnnnnnnnnnnnnnnnnnnnnnnnnnnnnnnnnnnnnnnnnnnnnnnnnnnnnnnnnnnnnnnnnnnnnnnnnnnnnnnnnnnnnnnnnnnnnnnnnnnnnnnnnnnnnnnnnnnnnnnnnnnnnnnnnnnnnnnnnnnnnnnnnnnnnnnnnnnnnnnnnnnnnnnnnnnnnnnnnnnnnnnnnnnnnnnnnnnnnnnnnnnnnnnnnnnnnnnnnnnnnnnnnnnnnnnnnnnnnnnnnnnnnnnnnnnnnnnnnnnnnnnnnnnnnnnnnnnnnnnnnnnnnnnnnnnnnnnnnnnnnnnnnnnnnnnnnnnnnnnnnnnnnnnnnnnnnnnnnnnnnnnnnnnnnnnnnnnnnnnnnnnnnnnnnnnnnnnnnnnnnnnnnnnnnnnnnnnnnnnnnnnnnnnnnnnnnnnnnnnnnnnnnnnnnnnnnnnnnnnnnnnnnnnnnnnnnnnnnnnnnnnnnnnnnnnnnnnnnnnnnnnnnnnnnnnnnnnnnnnnnnnnnnnnnnnnnnnnnnnnnnnnnnnnnnnnnnnnnnnnnnnnnnnnnnnnnnnnnnnnnnnnnnnnnnnnnnnnnnnnnnnnnnnnnnnnnnnnnnnnnnnnnnnnnnnnnnnnnnnnnnnnnnnnnnnnnnnnnnnnnnnnnnnnnnnnnnnnnnnnnnnnnnnnnnnnnnnnnnnnnnnnnnnnnnnnnnnnnnnnnnnnnnnnnnnnnnnnnnnnnnnnnnnnnnnnnnnnnnnnnnnnnnnnnnnnnnnnnnnnnnnnnnnnnnnnnnnnnnnnnnnnnnnnnnnnnnnnnnnnnnnnnnnnnnnnnnnnnnnnnnnnnnnnnnnnnnnnnnnnnnnnnnnnnnnnnnnnnnnnnnnnnnnnnnnnnnnnnnnnnnnnnnnnnnnnnnnnnnnnnnnnnnnnnnnnnnnnnnnnnnnnnnnnnnnnnnnnnnnnnnnnnnnnnnnnnnnnnnnnnnnnnnnnnnnnnnnnnnnnnnnnnnnnnnnnnnnnnnnnnnnnnnnnnnnnnnnnnnnnnnnnnnnnnnnnnnnnnnnnnnnnnnnnnnnnnnnnnnnnnnnnnnnnnnnnnnnnnnnnnnnnnnnnnnnnnnnnnnnnnnnnnnnnnnnnnnnnnnnnnnnnnnnnnnnnnnnnnnnnnnnnnnnnnnnnnnnnnnnnnnnnnnnnnnnnnnnnnnnnnnnnnnnnnnnnnnnnnnnnnnnnnnnnnnnnnnnnnnnnnnnnnnnnnnnnnnnnnnnnnnnnnnnnnnnnnnnnnnnnnnnnnnnnnnnnnnnnnnnnnnnnnnnnnnnnnnnnnnnnnnnnnnnnnnnnnnnnnnnnnnnnnnnnnnnnnnnnnnnnnnnnnnnnnnnnnnnnnnnnnnnnnnnnnnnnnnnnnnnnnnnnnnnnnnnnnnnnnnnnnnnnnnnnnnnnnnnnnnnnnnnnnnnnnnnnnnnnnnnnnnnnnnnnnnnnnnnnnnnnnnnnnnnnnnnnnnnnnnnnnnnnnnnnnnnnnnnnnnnnnnnnnnnnnnnnnnnnnnnnnnnnnnnnnnnnnnnnnnnnnnnnnnnnnnnnnnnnnnnnnnnnnnnnnnnnnnnnnnnnnnnnnnnnnnnnnnnnnnnnnnnnnnnnnnnnnnnnnnnnnnnnnnnnnnnnnnnnnnnnnnnnnnnnnnnnnnnnnnnnnnnnnnnnnnnnnnnnnnnnnnnnnnnnnnnnnnnnnnnnnnnnnnnnnnnnnnnnnnnnnnnnnnnnnnnnnnnnnnnnnnnnnnnnnnnnnnnnnnnnnnnnnnnnnnnnnnnnnnnnnnnnnnnnnnnnnnnnnnnnnnnnnnnnnnnnnnnnnnnnnnnnnnnnnnnnnnnnnnnnnnnnnnnnnnnnnnnnnnnnnnnnnnnnnnnnnnnnnnnnnnnnnnnnnnnnnnnnnnnnnnnnnnnnnnnnnnnnnnnnnnnnnnnnnnnnnnnnnnnnnnnnnnnnnnnnnnnnnnnnnnnnnnnnnnnnnnnnnnnnnnnnnnnnnnnnnnnnnnnnnnnnnnnnnnnnnnnnnnnnnnnnnnnnnnnnnnnnnnnnnnnnnnnnnnnnnnnnnnnnnnnnnnnnnnnnnnnnnnnnnnnnnnnnnnnnnnnnnnnnnnnnnnnnnnnnnnnnnnnnnnnnnnnnnnnnnnnnnnnnnnnnnnnnnnnnnnnnnnnnnnnnnnnnnnnnnnnnnnnnnnnnnnnnnnnnnnnnnnnnnnnnnnnnnnnnnnnnnnnnnnnnnnnnnnnnnnnnnnnnnnnnnnnnnnnnnnnnnnnnnnnnnnnnnnnnnnnnnnnnnnnnnnnnnnnnnnnnnnnnnnnnnnnnnnnnnnnnnnnnnnnnnnnnnnnnnnnnnnnnnnnnnnnnnnnnnnnnnnnnnnnnnnnnnnnnnnnnnnnnnnnnnnnnnnnnnnnnnnnnnnnnnnnnnnnnnnnnnnnnnnnnnnnnnnnnnnnnnnnnnnnnnnnnnnnnnnnnnnnnnnnnnnnnnnnnnnnnnnnnnnnnnnnnnnnnnnnnnnnnnnnnnnnnnnnnnnnnnnnnnnnnnnnnnnnnnnnnnnnnnnnnnnnnnnnnnnnnnnnnnnnnnnnnnnnnnnnnnnnnnnnnnnnnnnnnnnnnnnnnnnnnnnnnnnnnnnnnnnnnnnnnnnnnnnnnnnnnnnnnnnnnnnnnnnnnnnnnnnnnnnnnnnnnnnnnnnnnnnnnnnnnnnnnnnnnnnnnnnnnnnnnnnnnnnnnnnnnnnnnnnnnnnnnnnnnnnnnnnnnnnnnnnnnnnnnnnnnnnnnnnnnnnnnnnnnnnnnnnnnnnnnnnnnnnnnnnnnnnnnnnnnnnnnnnnnnnnnnnnnnnnnnnnnnnnnnnnnnnnnnnnnnnnnnnnnnnnnnnnnnnnnnnnnnnnnnnnnnnnnnnnnnnnnnnnnnnnnnnnnnnnnnnnnnnnnnnnnnnnnnnnnnnnnnnnnnnnnnnnnnnnnnnnnnnnnnnnnnnnnnnnnnnnnnnnnnnnnnnnnnnnnnnnnnnnnnnnnnnnnnnnnnnnnnnnnnnnnnnnnnnnnnnnnnnnnnnnnnnnnnnnnnnnnnnnnnnnnnnnnnnnnnnnnnnnnnnnnnnnnnnnnnnnnnnnnnnnnnnnnnnnnnnnnnnnnnnnnnnnnnnnnnnnnnnnnnnnnnnnnnnnnnnnnnnnnnnnnnnnnnnnnnnnnnnnnnnnnnnnnnnnnnnnnnnnnnnnnnnnnnnnnnnnnnnnnnnnnnnnnnnnnnnnnnnnnnnnnnnnnnnnnnnnnnnnnnnnnnnnnnnnnnnnnnnnnnnnnnnnnnnnnnnnnnnnnnnnnnnnnnnnnnnnnnnnnnnnnnnnnnnnnnnnnnnnnnnnnnnnnnnnnnnnnnnnnnnnnnnnnnnnnnnnnnnnnnnnnnnnnnnnnnnnnnnnnnnnnnnnnnnnnnnnnnnnnnnnnnnnnnnnnnnnnnnnnnnnnnnnnnnnnnnnnnnnnnnnnnnnnnnnnnnnnnnnnnnnnnnnnnnnnnnnnnnnnnnnnnnnnnnnnnnnnnnnnnnnnnnnnnnnnnnnnnnnnnnnnnnnnnnnnnnnnnnnnnnnnnnnnnnnnnnnnnnnnnnnnnnnnnnnnnnnnnnnnnnnnnnnnnnnnnnnnnnnnnnnnnnnnnnnnnnnnnnnnnnnnnnnnnnnnnnnnnnnnnnnnnnnnnnnnnnnnnnnnnnnnnnnnnnnnnnnnnnnnnnnnnnnnnnnnnnnnnnnnnnnnnnnnnnnnnnnnnnnnnnnnnnnnnnnnnnnnnnnnnnnnnnnnnnnnnnnnnnnnnnnnnnnnnnnnnnnnnnnnnnnnnnnnnnnnnnnnnnnnnnnnnnnnnnnnnnnnnnnnnnnagtcacgtgatccaactgtatcagggatgaaaaatgacagtattcatcctagattctgacaggtttaaatgtaaaggagggttagatggatatagataaattcggtcctccttctaatccttaaagtatagtcactgtagtaagacgagtattttaattatattactcggtccttctgtcctctaataaaagccgtttgcttcgaaggataacttacgttatgatctcgctatgaggatagtatataataaagctagtagttagcgaaaactctttctatagagagaataggcttacctatctcattgttagtctgtctgcgtaatacgctactgtatactctaggctttggggggttagatatcatgtagtaattatctaatggaccttatcgataagtaaagacgtacctgctctatcccttactaggaaaaggcttgcttgcttaatgctgatagtccctgattgagctattaggtctcaatatatatcggctattatagggataattggctcttaaatgttatataagatacctagtggaggcgggcgacgtcttactatctagaactgtgaactctaaaccgcgaactctaaaccgcgaactctaaaccgcgaactctaaaccgtaaaactttaaatcgcggatactcctacccttgcttaactctctaggttagctggcgatctaatcctgtagttagcagcgctatggacgtttagctagcgactctcctacaaaccctacttttaggccatttttggaataagttagcggggttgccttctattccggcttaccctaatctctagggtaaagggtaagaccgcggggctactaatgacgtagtgacaccttaacggtctagactctgtatctagccgataattggtttatataaagatgactagacgtgctgttgtgatgtaactaaccgtaataggctgagcttactatactaataccacgccctatcttacccctagacctatccgagttcgatatattgtgagaagggttaccagagccttatctgtgagggaattaagatcctttctatctagtagcaagaatctatcatccttacgactttgtggcttaacgtagggatgtcagtaggtggtatttaatagattacgagtaaagatataaggtggtcttatcctagggtgggctctgtcagaagaaagtaagcctatttagggcgcttctctaaggtggagcgaggagtagctaggaactaatcatacattggctcctctgatccgttattattcccctacttttgtttttaaacggtacttcatgtgttttttcctagcttactgctaatcgctccttgaagtaattgtatctattttatgatgtccctctactatgccgttatttattatagtacaactactagagaattattagttatagtaaccacattgccgctgtgcttataggaattggaggtacactggccttaggaatggtattagttgttatttatgattttcgactgagctggactaatgttaagctgctgtgtgtagagcgggattaatactccttatccttgaacggccgatttacctagagctccttattcctcctaggatactacagtaagtgataggatctactatataaacgcggtaaggtaggactaattgatttatcttctatttatagataactgaaaggagtttgaccaagtaaaatcaaacgtataaatagcgtaggcctggttaaactctaactctctaagctaaaatcagacttgatatttatctgaataaaacggcgtaatcttcgacctatctatctatgttaatctactatctctgtcgttaaattgtgaattccgattattattcgaatattatcgggggagggacgcgctggtagctgattataggtcaggaaatagctgatagtatgttctaagttactacagagactgataatattaggctgagttatggaaatatagaatatcaaagcctttacctatatctcggtgaattagccattttctctatataatattagctagggaatttcgaactttatagaagtatatatattatccttctatagtcttggctaataagtaacgttatacttagattttatgataccgaccattttttactaacttgcttatatcgaaagatagtatcgcaaatatatgactttctgggaataggaaggtgttagtctctaggatttataatggctgcctcgatacagttaagaacataggtagtgaactttcttggtctaagattgagacgcctattcttttcctcattacagatggtcttatagagtatgctgacttggacttttgtgagtcaaatccttatatagttttctgcatttaggttgcccttctccttgatatgttggcagattccggcgatcctgtgtctcgcagaagagcctggtaagacgccaaagcctacaaaactccataatcgttcagtttgccagtgatttacttgactttccaagtgggccaagtcctgggggaaaagacagtcacctagttccatggctcgttaaagtttgtttagactcaaatccggaaacaatagtatcatgttttgagtatggtatataggtatgactccaggggcctggacatattgtaaggcttcaagcgaaagagaaggattagtatattgattttcctcggtcggattgtcaaccatatatggacttaaagattgcttagcagtttaggagataaagatcgctgactctactagtggtagtcctatgccaataccatccacattttcggacatattatatagggtggagccctctaagccagatgccggtagtagtgtataatcgaatgtacgggtattggtatatctaacaactaggagggatcgagatccgccggagtagagaaatcagagcctaaggtattggttcctatatctagactaggaacagactagggggttggatacaagtatatttccagaggctatggttttagcggattaatctccgagttcaaaggtatgggcgagataccaagattgtgggtgaactcactgaatatttttgttatagtataaacagcccttacctaaatggctttcatattcctatgaactaaataccagattaaacctaaggcttttcaagcccctagtatatatctgctactatactaactaaaaagtaaaaaaaagaaaaggtcattgtaagataagggttctatatagagattatagctattacttaggctctatgatgagtaattgcgctaaattagccccccccccccccccccccccccccccccccccccccccccccccctcccgccnnnnnnnnnnnnnnnnnnnnnnnnnnnnnnnnnnnnnnnnnnnnnnnnnnnnnnnnnnnnnnnnnnnnnnnnnnnnnnnnnnnnnnnnnnnnnnnnnnnnnnnnnnnnnnnnnnnnnnnnnnnnnnnnnnnnnnnnnnnnnnnnnnnnnnnnnnnnnnnnnnnnnnnnnnnnnnnnnnnnnnnnnnnnnnnnnnnnnnnnnnnnnnnnnnnnnnnnnnnnnnnnnnnnnnnnnnnnnnnnnnnnnnnnnnnnnnnnnnnnnnnnnnnnnnnnnnnnnnnnnnnnnnnnnnnnnnnnnnnnnnnnnnnnnnnnnnnnnnnnnnnnnnnnnnnnnnnnnnnnnnnnnnnnnnnnnnnnnnnnnnnnnnnnnnnnnnnnnnnnnnnnnnnnnnnnnnnnnnnnnnnnnnnnnnnnnnnnnnnnnnnnnnnnnnnnnnnnnnnnnnnnnnnnnnnnnnnnnnnnnnnnnnnnnnnnnnnnnnnnnnnnnnnnnnnnnnnnnnnnnnnnnnnnnnnnnnnnnnnnnnnnnnnnnnnnnnnnnnnnnnnnnnnnnnnnnnnnnnnnnnnnnnnnnnnnnnnnnnnnnnnnnnnnnnnnnnnnnnnnnnnnnnnnnnnnnnnnnnnnnnnnnnnnnnnnnnnnnnnnnnnnnnnnnnnnnnnnnnnnnnnnnnnnnnnnnnnnnnnnnnnnnnnnnnnnnnnnnnnnnnnnnnnnnnnnnnnnnnnnnnnnnnnnnnnnnnnnnnnnnnnnnnnnnnnnnnnnnnnnnnnnnnnnnnnnnnnnnnnnnnnnnnnnnnnnnnnnnnnnnnnnnnnnnnnnnnnnnnnnnnnnnnnnnnnnnnnnnnnnnnnnnnnnnnnnnnnnnnnnnnnnnnnnnnnnnnnnnnnnnnnnnnnnnnnnnnnnnnnnnnnnnnnnnnnnnnnnnnnnnnnnnnnnnnnnnnnnnnnnnnnnnnnnnnnnnnnnnnnnnnnnnnnnnnnnnnnnnnnnnnnnnnnnnnnnnnnnnnnnnnnnnnnnnnnnnnnnnnnnnnnnnnnnnnnnnnnnnnnnnnnnnnnnnnnnnnnnnnnnnnnnnnnnnnnnnnnnnnnnnnnnnnnnnnnnnnnnnnnnnnnnnnnnnnnnnnnnnnnnnnnnnnnnnnnnnnnnnnnnnnnnnnnnnnnnnnnnnnnnnnnnnnnnnnnnnnnnnnnnnnnnnnnnnnnnnnnnnnnnnnnnnnnnnnnnnnnnnnnnnnnnnnnnnnnnnnnnnnnnnnnnnnnnnnnnnnnnnnnnnnnnnnnnnnnnnnnnnnnnnnnnnnnnnnnnnnnnnnnnnnnnnnnnnnnnnnnnnnnnnnnnnnnnnnnnnnnnnnnnnnnnnnnnnnnnnnnnnnnnnnnnnnnnnnnnnnnnnnnnnnnnnnnnnnnnnnnnnnnnnnnnnnnnnnnnnnnnnnnnnnnnnnnnnnnnnnnnnnnnnnnnnnnnnnnnnnnnnnnnnnnnnnnnnnnnnnnnnnnnnnnnnnnnnnnnnnnnnnnnnnnnnnnnnnnnnnnnnnnnnnnnnnnnnnnnnnnnnnnnnnnnnnnnnnnnnnnnnnnnnnnnnnnnnnnnnnnnnnnnnnnnnnnnnnnnnnnnnnnnnnnnnnnnnnnnnnnnnnnnnnnnnnnnnnnnnnnnnnnnnnnnnnnnnnnnnnnnnnnnnnnnnnnnnnnnnnnnnnnnnnnnnnnnnnnnagtcacgtgatccaactgtatcagggatgaaaaatgacagtattcatcctagattctgacagatataaacgcgttttctttttaatagtatgaatattattctaaaaaggaaatccgccctaaccttagttttaaacggtgtttatagggactgaactgagtattggaccgcggataactgtatatagttaagggattgctaatcctatataagtagtatacctttcttaatcggccttttctggctatgctctatcattagcagcggtataagcagggctataaagagatattgatttcctgacttagatagtagtatctttactaatataactaataatggagggacctagtaaattacctgaaatggaagacagatatagagaggtactaccaagcgtataagtaagtttggccgagaatacctcggtatctggctatgaagtctcgcagctagtaagatggatatatggctatagaggaccctactgaccaatcacacgcagaatcacgataccatgaggaataatctatctgtggagcccttctaacctatacttaagatattgaaacagcttaaagaagaagatactgagcttatattttaggctatacgcctggtagggtactaccggtatttgtgggagtcttgtgtttctaaatatatagatggcaagtagcttgaagaagcaaatgaaaagctgcgggccggaaatattcagctatataacgaaggaagccacttgaagcttcgctaagataagtaggtagcttacttgtattctattgaaaatgtattagatgaagtttagggaaaccttattagtatacttaaagtttagaacaatcgatcggccagtgacttggctattttactaggagataggtttcctagatattagtctttgctgttgggcttgaatatattaaagccgtttcggagctgtattaccacaatattgcaattctggtatgtaacgatagtaagcctatgataacctactaatgaagcccttgaccctatgtccctagaattcgttgcctaccacgtgggttaaataaactaaatgctcgtctactggacttctagtacttcgtactatataaaacgatatgactatctagaccataaggatgagtagttagagttgtaaaagttagaaagggtagtaaattatgatctttgctaccgagaaggtgaggatttacctctagcgatagcagctaataggatagaataacccctaagattgtaattagaagaaggatagctaccactctaactgtgtaatataaagcgtaacgcagttacgcttgagtcctggtatgggttattgtatacccgtctacctaccataagagagaacctaagcctagataatctaaaaagagaaggaagagtacaatgacttacagtaggcaattaaagtaagtactaactactgtggccgtaatctttgttaggtataagaaaagtgtaaatagcggaaaatagattattaactgatatggtgcactagggaggctttgtaggaaaatgcttatttagagatactgatgtctggtggttaatataaaactgagaaataacgtgatggtatataccatgagtatagagggaaataaactggttatccctaatatcacttctctccctatcttacattttctgctctagctcagtcctatgtatactgctagtagaacgatctttggcgcaaatacggtaaggtcgagtttctagtacaataaggttttctaaactgctcgacgagaccatatgagaaggatacagctagctagtagtaacactgtggctagtagtgtatgtaatatagttggaatctgtatgactatcttatggttgaggtgtaagaataaaggggactttagctgactttatgcctggattgttagctatggtgcttactagatttgctctgtgctatgggttctaatgtcatgaagtcagctatcttgtgttacctaaagaaaatggcctaagtctaataagtctgttatatgctctctattcgtctttctagatgatattgtctctcttaggaaccactaagtccctaggagcctgatataagctcctaggaaccaaataaatgttcctaggagcgctataggcaattccaggagcccctaagcccctaggaacttagaattgggtcctaggagcgaagggctggtaaatgactatatggaatctgttaggcagtgctctgtgctcgagtttagtaataaactatctataatagggcaatctataaagccacaactgtatcctatctactgaactattattactctatattgccataaccagctgtagaaagtatatctcttatcgaattggcggctacctctgttctgttctgaaatagaataaaccactaatataatcatggtatgatagtcgttacttctaagaagctatacttatttattaaggcttacggagactaataatgagatatagactattaagttactcaccactatcctagacttaccgaccgagattctttgggttatagccgataccctaaggggaaacgaaatttctactcttacccgaactagccgaatactctatttaaagctacggttggtcttgatcaaatataatattaagtaccagaacagttctatatttcactgggctgctaaagctaactgtaccaactttataaaaaccttactctcctactgagctaacgttaatgtattggttgatgattgcttccctttgataacagctatgtaatataggtccgggttgacatttaagctcttcctgaagaattaaaagatagaagtcaacctgaggaataaggctagaaagagtgttttgtggtatagtgtagagaaaaattcatctgccgttgtgaaaaggctcctctaataccctgatattgagatagatcttttgtattgctagcgctaaaccgcactctggcttgcagtcttttatgaaagtaaagagcttgtggccatgctgctctctaaaggtgctaaccctgatgcgatagattaggatggtatattgccttggatcgaagcctatattaagaatagggagcctattaaatatttgttcctagattattgtagaacagtgtgccccgagataaagagtgagacgtgtaccggtaatatagaaatgattagggatgatacgaatagtaaggaccctggtacgttatgaatgcggcttagctggggagaagacgttgatatagtggatcactagggaagaacggccttatatcttgcagctgctagtggaaatctatcggctgttaagttacttctcgataaaaaatctatcgattgtgatgtgctggactaaagaaacggcataccgctctatgtagctgcaatgggtggatatctcgcagtggtagatctattactgcgttaaaacgctctcgtaaactgtaaggacgattctagaaataccctgctgtggtatttaacttctagttattatgacgatatcatagagagacttttgactgaaaataatatggatgttaatatagtcggaggaggagggagatatagtgagccttctactttactatactatctggtaaggagaatggatacagttgttctacgatggtttcttataagactaactctcgatctaaatatctgtgtgggctttcgatcacctctctgcctagctataatagagggtaacattgcggttataagattgttccttacttataacgagcttgaaatcaatgctcgacatatatataaagattccctgctctgcctagctaccaaaagaggcaatgttaatatggtgaaattattggtggaataaggtgatcgattgaagattaaccagctgaacaatattgataaggagagtgtactttttgtggctgtctataatcaaagctttaatattctggatatcttgcttcagtatcctgccattaaccttaatttaagtaattgttagggcgaaactgcgttggggttggcagttaaaggaggagatgtgaaaatagttaaaaggctactccaggactcgaaacgtgttttaaacctaaaagttccagctcttagatcctataatagtcatgctatgaagaagcttattgaagataagatagagtggaaaagacaggacagctgttatctaagctaagatcggctgtttataagatatataaggtttgcctatatctaataacttttattaaataagaatagtctctggctgttatttatatcttattctttaaaaattaatcaagatttactccggatcattctagtattttattaggtaaacaggctagcgatatatattaggatatatggacgatcattttattatagcgactgttctgatacggggttatatgaaagataggcagagtattactctaaatgagcctataataaatagactgtaaagggatggagcttattacttaaaaccacgagagaaagctctttctacccttaggaaattaataatatgaaaagtaaggcttagctgcctatatataggtaatcgtctctctctctaagttattgataactgtcagaatctaggatgaatactgtcatttttcatccctgatacagttggatcacgtgactnnnnnnnnnnnnnnnnnnnnnnnnnnnnnnnnnnnnnnnnnnnnnnnnnnnnnnnnnnnnnnnnnnnnnnnnnnnnnnnnnnnnnnnnnnnnnnnnnnnnnnnnnnnnnnnnnnnnnnnnnnnnnnnnnnnnnnnnnnnnnnnnnnnnnnnnnnnnnnnnnnnnnnnnnnnnnnnnnnnnnnnnnnnnnnnnnnnnnnnnnnnnnnnnnnnnnnnnnnnnnnnnnnnnnnnnnnnnnnnnnnnnnnnnnnnnnnnnnnnnnnnnnnnnnnnnnnnnnnnnnnnnnnnnnnnnnnnnnnnnnnnnnnnnnnnnnnnnnnnnnnnnnnnnnnnnnnnnnnnnnnnnnnnnnnnnnnnnnnnnnnnnnnnnnnnnnnnnnnnnnnnnnnnnnnnnnnnnnnnnnnnnnnnnnnnnnnnnnnnnnnnnnnnnnnnnnnnnnnnnnnnnnnnnnnnnnnnnnnnnnnnnnnnnnnnnnnnnnnnnnnnnnnnnnnnnnnnnnnnnnnnnnnnnnnnnnnnnnnnnnnnnnnnnnnnnnnnnnnnnnnnnnnnnnnnnnnnnnnnnnnnnnnnnnnnnnnnnnnnnnnnnnnnnnnnnnnnnnnnnnnnnnnnnnnnnnnnnnnnnnnnnnnnnnnnnnnnnnnnnnnnnnnnnnnnnnnnnnnnnnnnnnnnnnnnnnnnnnnnnnnnnnnnnnnnnnnnnnnnnnnnnnnnnnnnnnnnnnnnnnnnnnnnnnnnnnnnnnnnnnnnnnnnnnnnnnnnnnnnnnnnnnnnnnnnnnnnnnnnnnnnnnnnnnnnnnnnnnnnnnnnnnnnnnnnnnnnnnnnnnnnnnnnnnnnnnnnnnnnnnnnnnnnnnnnnnnnnnnnnnnnnnnnnnnnnnnnnnnnnnnnnnnnnnnnnnnnnnnnnnnnnnnnnnnnnnnnnnnnnnnnnnnnnnnnnnnnnnnnnnnnnnnnnnnnnnnnnnnnnnnnnnnnnnnnnnnnnnnnnnnnnnnnnnnnnnnnnnnnnnnnnnnnnnnnnnnnnnnnnnnnnnnnnnnnnnnnnnnnnnnnnnnnnnnnnnnnnnnnnnnnnnnnnnnnnnnnnnnnnnnnnnnnnnnnnnnnnnnnnnnnnnnnnnnnnnnnnnnnnnnnnnnnnnnnnnnnnnnnnnnnnnnnnnnnnnnnnnnnnnnnnnnnnnnnnnnnnnnnnnnnnnnnnnnnnnnnnnnnnnnnnnnnnnnnnnnnnnnnnnnnnnnnnnnnnnnnnnnnnnnnnnnnnnnnnnnnnnnnnnnnnnnnnnnnnnnnnnnnnnnnnnnnnnnnnnnnnnnnnnnnnnnnnnnnnnnnnnnnnnnnnnnnnnnnnnnnnnnnnnnnnnnnnnnnnnnnnnnnnnnnnnnnnnnnnnnnnnnnnnnnnnnnnnnnnnnnnnnnnnnnnnnnnnnnnnnnnnnnnnnnnnnnnnnnnnnnnnnnnnnnnnnnnnnnnnnnnnnnnnnnnnnnnnnnnnnnnnnnnnnnnnnnnnnnnnnnnnnnnnnnnnnnnnnnnnnnnnnnnnnnnnnnnnnnnnnnnnnnnnnnnnnnnnnnnnnnnnnnnnnnnnnnnnnnnnnnnnnnnnnnnnnnnnnnnnnnnnnnnnnnnnnnnnnnnnnnnnnnnnnnnnnnnnnnnnnnnnnnnnnnnnnnnnnnnnnnnnnnnnnnnnnnnnnnnnnnnnnnnnnnnnnnnnnnnnnnnnnnnnnnnnnnnnnnnnnnnnnnnnnnnnnnnnnnnnnnnnnnnnnnnnnnnnnnnnnnnnnnnnnnnnnnnnnnnnnnnnnnnnnnnnnnnnnnnnnnnnnnnnnnnnnnnnnnnnnnnnnnnnnnnnnnnnnnnnnnnnnnnnnnnnnnnnnnnnnnnnnnnnnnnnnnnnnnnnnnnnnnnnnnnnnnnnnnnnnnnnnnnnnnnnnnnnnnnnnnnnnnnnnnnnnnnnnnnnnnnnnnnnnnnnnnnnnnnnnnnnnnnnnnnnnnnnnnnnnnnnnnnnnnnnnnnnnnnnnnnnnnnnnnnnnnnnnnnnnnnnnnnnnnnnnnnnnnnnnnnnnnnnnnnnnnnnnnnnnnnnnnnnnnnnnnnnnnnnnnnnnnnnnnnnnnnnnnnnnnnnnnnnnnnnnnnnnnnnnnnnnnnnnnnnnnnnnnnnnnnnnnnnnnnnnnnnnnnnnnnnnnnnnnnnnnnnnnnnnnnnnnnnnnnnnnnnnnnnnnnnnnnnnnnnnnnnnnnnnnnnnnnnnnnnnnnnnnnnnnnnnnnnnnnnnnnnnnnnnnnnnnnnnnnnnnnnnnnnnnnnnnnnnnnnnnnnnnnnnnnnnnnnnnnnnnnnnnnnnnnnnnnnnnnnnnnnnnnnnnnnnnnnnnnnnnnnnnnnnnnnnnnnnnnnnnnnnnnnnnnnnnnnnnnnnnnnnnnnnnnnnnnnnnnnnnnnnnnnnnnnnnnnnnnnnnnnnnnnnnnnnnnnnnnnnnnnnnnnnnnnnnnnnnnnnnnnnnnnnnnnnnnnnnnnnnnnnnnnnnnnnnnnnnnnnnnnnnnnnnnnnnnnnnnnnnnnnnnnnnnnnnnnnnnnnnnnnnnnnnnnnnnnnnnnnnnnnnnnnnnnnnnnnnnnnnnnnnnnnnnnnnnnnnnnnnnnnnnnnnnnnnnnnnnnnnnnnnnnnnnnnnnnnnnnnnnnnnnnnnnnnnnnnnnnnnnnnnnnnnnnnnnnnnnnnnnnnnnnnnnnnnnnnnnnnnnnnnnnnnnnnnnnnnnnnnnnnnnnnnnnnnnnnnnnnnnnnnnnnnnnnnnnnnnnnnnnnnnnnnnnnnnnnnnnnnnnnnnnnnnnnnnnnnnnnnnnnnnnnnnnnnnnnnnnnnnnnnnnnnnnnnnnnnnnnnnnnnnnnnnnnnnnnnnnnnnnnnnnnnnnnnnnnnnnnnnnnnnnnnnnnnnnnnnnnnnnnnnnnnnnnnnnnnnnnnnnnnnnnnnnnnnnnnnnnnnnnnnnnnnnnnnnnnnnnnnnnnnnnnnnnnnnnnnnnnnnnnnnnnnnnnnnnnnnnnnnnnnnnnnnnnnnnnnnnnnnnnnnnnnnnnnnnnnnnnnnnnnnnnnnnnnnnnnnnnnnnnnnnnnnnnnnnnnnnnnnnnnnnnnnnnnnnnnnnnnnnnnnnnnnnnnnnnnnnnnnnnnnnnnnnnnnnnnnnnnnnnnnnnnnnnnnnnnnnnnnnnnnnnnnnnnnnnnnnnnnnnnnnnnnnnnnnnnnnnnnnnnnnnnnnnnnnnnnnnnnnnnnnnnnnnnnnnnnnnnnnnnnnnnnnnnnnnnnnnnnnnnnnnnnnnnnnnnnnnnnnnnnnnnnnnnnnnnnnnnnnnnnnnnnnnnnnnnnnnnnnnnnnnnnnnnnnnnnnnnnnnnnnnnnnnnnnnnnnnnnnnnnnnnnnnnnnnnnnnnnnnnnnnnnnnnnnnnnnnnnnnnnnnnnnnnnnnnnnnnnnnnnnnnnnnnnnnnnnnnnnnnnnnnnnnnnnnnnnnnnnnnnnnnnnnnnnnnnnnnnnnnnnnnnnnnnnnnnnnnnnnnnnnnnnnnnnnnnnnnnnnnnnnnnnnnnnnnnnnnnnnnnnnnnnnnnnnnnnnnnnnnnnnnnnnnnnnnnnnnnnnnnnnnnnnnnnnnnnnnnnnnnnnnnnnnnnnnnnnnnnnnnnnnnnnnnnnnnnnnnnnnnnnnnnnnnnnnnnnnnnnnnnnnnnnnnnnnnnnnnnnnnnnnnnnnnnnnnnnnnnnnnnnnnnnnnnnnnnnnnnnnnnnnnnnnnnnnnnnnnnnnnnnnnnnnnnnnnnnnnnnnnnnnnnnnnnnnnnnnnnnnnnnnnnnnnnnnnnnnnnnnnnnnnnnnnnnnnnnnnnnnnnnnnnnnnnnnnnnnnnnnnnnnnnnnnnnnnnnnnnnnnnnnnnnnnnnnnnnnnnnnnnnnnnnnnnnnnnnnnnnnnnnnnnnnnnnnnnnnnnnnnnnnnnnnnnnnnnnnnnnnnnnnnnnnnnnnnnnnnnnnnnnnnnnnnnnnnnnnnnnnnnnnnnnnnnnnnnnnnnnnnnnnnnnnnnnnnnnnnnnnnnnnnnnnnnnnnnnnnnnnnnnnnnnnnnnnnnnnnnnnnnnnnnnnnnnnnnnnnnnnnnnnnnnnnnnnnnnnnnnnnnnnnnnnnnnnnnnnnnnnnnnnnnnnnnnnnnnnnnnnnnnnnnnnnnnnnnnnnnnnnnnnnnnnnnnnnnnnnnnnnnnnnnnnnnnnnnnnnnnnnnnnnnnnnnnnnnnnnnnnnnnnnnnnnnnnnnnnnnnnnnnnnnnnnnnnnnnnnnnnnnnnnnnnnnnnnnnnnnnnnnnnnnnnnnnnnnnnnnnnnnnnnnnnnnnnnnnnnnnnnnnnnnnnnnnnnnnnnnnnnnnnnnnnnnnnnnnnnnnnnnnnnnnnnnnnnnnnnnnnnnnnnnnnnnnnnnnnnnnnnnnnnnnnnnnnnnnnnnnnnnnnnnnnnnnnnnnnnnnnnnnnnnnnnnnnnnnnnnnnnnnnnnnnnnnnnnnnnnnnnnnnnnnnnnnnnnnnnnnnnnnnnnnnnnnnnnnnnnnnnnnnnnnnnnnnnnnnnnnnnnnnnnnnnnnnnnnnnnnnnnnnnnnnnnnnnnnnnnnnnnnnnnnnnnnnnnnnnnnnnnnnnnnnnnnnnnnnnnnnnnnnnnnnnnnnnnnnnnnnnnnnnnnnnnnnnnnnnnnnnnnnnnnnnnnnnnnnnnnnnnnnnnnnnnnnnnnnnnnnnnnnnnnnnnnnnnnnnnnnnnnnnnnnnnnnnnnnnnnnnnnnnnnnnnnnnnnnnnnnnnnnnnnnnnnnnnnnnnnnnnnnnnnnnnnnnnnnnnnnnnnnnnnnnnnnnnnnnnnnnnnnnnnnnnnnnnnnnnnnnnnnnnnnnnnnnnnnnnnnnnnnnnnnnnnnnnnnnnnnnnnnnnnnnnnnnnnnnnnnnnnnnnnnnnnnnnnnnnnnnnnnnnnnnnnnnnnnnnnnnnnnnnnnnnnnnnnnnnnnnnnnnnnnnnnnnnnnnnnnnnnnnnnnnnnnnnnnnnnnnnnnnnnnnnnnnnnnnnnnnnnnnnnnnnnnnnnnnnnnnnnnnnnnnnnnnnnnnnnnnnnnnnnnnnnnnnnnnnnnnnnnnnnnnnnnnnnnnnnnnnnnnnnnnnnnnnnnnnnnnnnnnnnnnnnnnnnnnnnnnnnnnnnnnnnnnnnnnnnnnnnnnnnnnnnnnnnnnnnnnnnnnnnnnnnnnnnnnnnnnnnnnnnnnnnnnnnnnnnnnnnnnnnnnnnnnnnnnnnnnnnnnnnnnnnnnnnnnnnnnnnnnnnnnnnnnnnnnnnnnnnnnnnnnnnnnnnnnnnnnnnnnnnnnnnnnnnnnnnnnnnnnnnnnnnnnnnnnnnnnnnnnnnnnnnnnnnnnnnnnnnnnnnnnnnnnnnnnnnnnnnnnnnnnnnnnnnnnnnnnnnnnnnnnnnnnnnnnnnnnnnnnnnnnnnnnnnnnnnnnnnnnnnnnnnnnnnnnnnnnnnnnnnnnnnnnnnnnnnnnnnnnnnnnnnnnnnnnnnnnnnnnnnnnnnnnnnnnnnnnnnnnnnnnnnnnnnnnnnnnnnnnnnnnnnnnnnnnnnnnnnnnnnnnnnnnnnnnnnnnnnnnnnnnnnnnnnnnnnnnnnnnnnnnnnnnnnnnnnnnnnnnnnnnnnnnnnnnnnnnnnnnnnnnnnnnnnnnnnnnnnnnnnnnnnnnnnnnnnnnnnnnnnnnnnnnnnnnnnnnnnnnnnnnnnnnnnnnnnnnnnnnnnnnnnnnnnnnnnnnnnnnnnnnnnnnnnnnnnnnnnnnnnnnnnnnnnnnnnnnnnnnnnnnnnnnnnnnnnnnnnnnnnnnnnnnnnnnnnnnnnnnnnnnnnnnnnnnnnnnnnnnnnnnnnnnnnnnnnnnnnnnnnnnnnnnnnnnnnnnnnnnnnnnnnnnnnnnnnnnnnnnnnnttgttttgtttgttttgattactaagttgtccatcagattgtcatgttttaggactattgtcagttttagagagttagagaatttattaagatttttctgccacaaaatacactcgccttaccaccgtttttccgtcagatcctccccctctcccccctataaagagatattaaaaagaggggttatataggtataagttatcctataagacattaggagatatcagatttacaaagtacaaggtagtcttacttatatccctcttatcaaagaggatacctacctaatgtatccaaaattatctttcccttctctagataatcacatctacctatctatccgtacaaccttctgcgttagaaatacttttactactttaaggatcataagagctacaaattctacagctatctcctttcacaataacttaccgcggaaattggcgatctcagggcaatacgagcaaccgaggaggacccaatagcttcagaaagcgcaatcagtcggaaacattctatatatactttcgacgtggtatatgctactacggtgagaggtacagattctcgcatgatataaataaggcttccgactttagatcaaacccggctatataccatcccataacctataatctagacgcttagaatcaatactttgactagaagaggttcctgagaaacgggatatcaagatctatgtattctctgatgaaacaagaggagctcctttaattctagaacagggctctcgaaattctggaaagcgacagtagagagaatcatcagttcctcgccaaagatcttatgaataatgagcttcatagatatgattttatcctggtaactacggaggcgcataattctaagggaattattccagcttataataagctgttccttaaagtcattacctatcattctctcttagactgtctttctatcgagtcatatattagcactctgtatatatccttcggtagcacaaatagagattgagcgatcagatatctgagtaatatctaccagagccttataggcagaggtgaagaaaccagcgaatttaccttagttatttcactagacacggtgaaattactgttaaataccctttaccagctcttatcaagggtctaacgcgcttaatttcacaatgaactccccgtactacttaacctagcccacaaactggcctctaaaataacagaagaatgctcgaaagctgacctcaatggacttcagagcagaatagaagtcatacagagcctagtaactagcataagccgcaaccttattacacccagggtatatgagggagatccccagaggactaggccagtcctatcgtcttttccaatagatatacaaatacctggcgggagatataataacgacctcacagatatatccgaaattctaattcttcctactcttagagagattattaatatcaatccagaatatctaccctctaccaatttcctacaaccgcactttctcgccgaccctttacaaagatatattgatttaacgttccgactgctataccacaatatctttagctctacaaaagatattcttagggatctgtaacagtagactgatttaatataaagtccttatctatcaggtaaggatagcgcggcacatctctacctagggacacaagttcagcacatatttatcaataataggaataagcttaaagcaactatatccttttctattctaccatagctccgcaaaaggacctctaaagagtaatccaaatagtaggaagactctagtcgacttaataaaggaagccttatctactttttaatatcccaaggaactcatagaaagcttatcttcctcgaagtaactgtaaagaatacttccaaaaaccaagtgtactagaataagaacagtcttatatctaacagacattcacctagtattacagttaaacttacggcttatttataatataaactaatattcctaggccagctttatagtgagagacttactagcattctagttaaattctatggcttaatccctaccacattcgtccctatcctagaaaacctacaataaatccaatgcgaaggggatttagcattccgaaagtaggtcttactagactataagagtaataaagatcgacacaatatccccctaccggcatatatacgtaaaccagggtttatctttcccctaacttcaatcgcaacccctaccgctaacaacgttacattagatccgagtacccctaagtccgttaataccttaaagctataaactcagactggtctagattatagctagtatcagggacttatcgcagctctcacacaagagtataccctaatccaaggcctactaagcaccggaaagtcctatttaggcgttaaggttatccaagctctacttaaaattaagaaaaatacaaaccttaaaccaatcattatgatataagtagtgagttcataccttccagtattcttacttacaggaaccataggtattataccaaccataccttagaccaattcttaaagcaccttcttaatataggcatctagaaagtgatatacattagtggccgcagtcaggcccctaagcttaaaggtaagaaccttcgcgttatcagtaaagactttaggaagacaaaggtagaatcgcagaccctcagcaagtcctatagggaactcgaagcccatatggaagatactggatatataatgaaacctctacaccagtcttaaaagggcctatcttaggccgctatagggaacttcgtgcacagaaaatagcctactatatataagcagcttaaccgactggatctagaagggttcataactgtcacagataacaaattgctttattagcttagggttaaatcgataagaatccagaaaggtcagaacgaggataaagttgatattatatgcttagaacgcttaacacatactacctaggaagatatttatactcttataaacccagaacgccagattcttacaatggagtggttcaaatagtagcgggaaagcgaaattacctagatttttaaggccattaatcataccgcgagccttcgtaataacatcaatgcagtctataataaggtcaatcgctaagccctaattcaagtagatgtaatcggaatcataacaacatcccttatacgccacatcaagacattataccgcttaggattaaaggtcattatatacaaggaagcagcagaagtaatagaaacccatatcatctcagcccttatgccaggtattgagcactttattcagattagagatcatcgacagctgcaaccccagattcaaaattattcactcagtcttaaatcatccacaggaatagtatagcagctagacagaagccagtttaagagacatactctcggcgagctaggtcttaagcctacccctttttcacagcttaatatatagcaaagaataagacccgaaatctcgcaacttatcagaagggtctatcccaaacttaaggaccataaaagcaccacagctttacctaatattattagaataagggacaacctcttctagctagaccattaatacaaggaagacttaagagataacagtagctgtattaagtcttatagcaaccaataggaggtcgatatagctactactcttattcggcatcttgttcggtaaggagagtataagagcacagatattgccctcttaaccctatataccgggtagttacagaatctcaggacattgcttagcaaggatttcgagatttaccttagtaagcgagacctagaaaccttagctacagataggtttaagaaggtagaagataaggatctagagtcaaataattgtaaggcacttgagaaaaagatattacttcagacactccgccttgccacagtcaacaatttctaaggcaaggaggcaaaagtaatagtggtctccctagttcgcagcaataaaaagtgtaaggttggctttctgtgtaccgagaaccgcattaacgtgctccttagccgggcttaatatagcatatacctcattggaaatgctgaaatatatcttaatatagaaatgtgggccgatgtctactctcagctctcctgtgcgaatgcagttaatatagagttagctctatactatcctcgccatctagatatacctattctatgctctggtccttatgactttgaaaggaagagtccaaagggtaggtgtagtctcctgtataaccgacgacttgagctatatggccattaatgctaggctaagtgccattcgacggttatatacgacggctttatgtatagaaagccttacctatgtatccgatcaacctgtcactataaataccctaagctttgtggtgaatattgtggcctttgcttaacgaagattcaagatgttaagcttccttgtggttatattaagaaggtcctctattactattagatgttgaacctggagctcattaagtgcgatattgaggttgaaaagactgttcctaagtgtggccataaaattaaggttagctattttaaggatatcacgtccccgatcttctgttaccctgagctatacattgatatccttagctatggctataactgcagtgattgctatggaaattgtctctaggaagttgttaatagaagaagaataaccaagtatctgaagtatataaaaatatgtgaccgtctatatggtgtttataaccataggtgtcctaaggaataccacgatagggaaagctgcggttcctataaggcaaagtacaaagtaagactcgcaatcacccattatctcattattatacagaaacactaaccataccataggtccgatgctcgcattcagcatacgactcaacttataaaaaggcatatataccatacatcgagaaatatacctagtcctacgcctatcaaggctcctactcaataccttatacagcaccatacaatcgacttccctgcgataagcgatatactaaaaatcttaaatacagccactagtatctaagcctctatagggaaggttatccaaacaatctgtatcaaaagtgcggtaacaagagtgatactcgtattaacttcatcgaaataaaagactattctaaaatcaacctcgataaaactccgattatcatacttaaatacagttatttctttataagtaagtcggttgatagattagttggcctagatcaagtatacataagggataaagatagaaagttcgaagacctctataatctctcttcttctcttaccacagccataccctcatgccctaactgtaaacagcctattcgccaatttatgacgaaacattacaattgtgttatcaatcgtgctattatagacaagacttacaagcggttccttgccaaaggtcgcatagacctcataaaccttaaatcgcgtctaaataatattaaacacaagctcaactccaagggggcgtttctactccctaggaacgctgctacaaagcttaaagcacttgatatagaggccttaaaacttagcaaaaccatataggccgagaatcaaccgataaaacggcttatagatacgattactaccagccagaaactagaacagaacgaaattgcctccctattagccagaatagaggcaacgaatctagcaatccaggaacctaatagtcaaattactcttggcataaggctaattcagataaaatcccaagaaattgcaattagccatttgtttaaagttatatagttaagaaaagatcctctagaagtacagccaggtattaccaaagtatcactaatgttaacttaggtattagaaaattaccgagacttaataactcaggcatataaacgaagtctctaccgcatcgttatcatagcaaccatctcatttgcgaaaatcgcccagctagacgcgtaatatcgccgcacttatccagtaaaagcaatatcggatctaaatcccaaagaagctagcgccaattctagaaagctcgaaaatcgcactaaaaccatccgcgatctccttaccactatattaaaactatacaatggactagggaactaccctaagctctaagaacaggtccaggaaataacctatctctacgaagggccgcgatataagacagtaactttagaagaattagaatcaattaagacagccatagtcagtaggcaaagaggaatagcgactcactctgggcactagtataattgcgttaacggatatctagtaagtaaatttccctagtcttaatctatctactatcctaagttaccttaataggacaacttagctaacaatattttctagtttactattagagagtgtagtataccaatagagcaagctagatacccagagtatagagcacctattagaggtcaaaaccacacggccgttacaggtgtatctcaagcgcgggaaatagagtagatagaaaccatattatatttcaattatagtaggaaaatatatgttttcttttctttccctgatactatatacgaatctaaactcaaatgtttttagatagtttatcaagcgtctataccttatcctagctattagggatatatataaagtatacaggatatttagagaaatgatctgcaggacccacatagcatatataggttcccctaaacgcgaggaagcctattccttttacttcctcgcgctatatcttatatctagagtcgactatagctttctttaatattaactacttatctaaatacactatccttatctatagatacgtgagaccctcacaaatagatactacattactgggaatagatgctatattactagggatagatactacgtttctggaagtagactaggatctatgaaaccatatgccaatcgatcgatcaattaattcatagtctatcccagccttttagaaaacattctcagccacactcagataacagcaagactatcgttttataggtctagctctataaccatatatataaataattatatatatagaactaaacaaggataggaattatagaagataagaatttgtaaagccttaggtagcaaggcttctagaagaccaggacagtagttttaaatgagcttattctaaaccgcgaacttaaaagtatcctttaaccctaagtagaccctcagccatacgatagtagggaacttatggttctccaggaggctgattggatataggtatttagcggtttgaaactacgaccccttaagcctttctgccgttaaggctcgttatttattattgtctcgtatatatatactaaataaagcaggtaagttattaaatccagaaagacagcttctcaataatataaaaagggaaatattaaatagcctattgatattatgaacctagacatgctcactactctttagcgtcaggcgctgtcgttatctccaaaacctatcgtattatgggtctattcttttacgtctataaatactactatagataggaaggctaagattactataaggggttttctaatataacgagcatatattaaacagaacttatctccagttaaagaagttagaaaatagagcactatcacagaaaataatatccagatccaaggttgatttttcttaagcatagataaaatagagtactttaatttaacagaatacctataagcctcccaattaatcggtatataactcaacacggtacatataagttgaagttttctactatatttagattagatagatggttattaaataaaacattataacaacccggtttattcaggtcactaaatcaatttctgaattctactaattaaaagctcgacctcttagggcattgtttctctctactagccccttctatatcctttccctcattttaccaataggcattatcggtaaggtttaggccgcagacgttatatctactcctatcgaacttcctcctaggtaacggctctcttatattacagctttttttctaggcccttattaaggggaccaaacactgtaagagatttccaccatatctctggtcttaagcatctctactaaagccgcagtcgaagcatagtttttgatcgctttaagggaggttcagggctattagcagccttattctttagcgacggttatatattaaaataatagtcaagtaaaggcatggtatcagatatatcttataagcggtacattgactaacgagagatattacttattatccaaaataatataggaggggatataatactttaactaggggaaatcaggctatatatcggtctcccttatcattactattactagaaagtactccgtcttatagaacctagataataggtctctcgtcccttatttagtcgaatagaataagaaattagtggtcggtggtaggtccatacttaggcagccgataaagttaattgtactgcctctagacttatctctctccccctatacctaactgcttaaacttaaggtcctattaaagattttcaacgtttttaatcttcggttaccggcttagccccactaggatgtttatacttaaacgataatataatttccgtcaaacgttcagtccttaacgccttaaataagatatttaatatataggctgaatatatagagggcttacggccttacttaacagaccaaaagcaatcatagtccttagtagtaataagaagcgtacgttcttcagataacagtgccgtaaggcattagcagcctatatatataggtaactatattccctcagtctaataagacgaattaacgcgcctcagttaaccgacttaaccttatcgtcgctcccagctaagtccatctatagctattaggcagggatagatacgcttagtcaataacggaatctaaaaagagcctattacagttgaacttaggtagtagaagtatgggcctataccggtctatttataaagaaataggccagttacttaaggtagttactccgtagacgctataggctacccaatcagaacgggaccacctacctagagaagaggtaagcatttttatccattaagccgccccgagggcctatataacgctgaagatagacacaaaacgcgaccggcatatagcaaaaaggaaagcagatcatttatagcaaaaatccgcgaattagaatacgctaaccacaatataagcggcgagcttgaccgcacacacatccatctagaggagtccctcggtaaaaaccgcgaaatataagccaaagtccatcggctttaggatgagctagagtacaattcatcccaagcaagtcacttagaaaataagctagttcatatcataggggggattactaaagctatacaggtattataggtttattaggcgcaggagaggagtatatcagattcgtatagagacagataagataaatctggtaatagcatagacagcacagtactaggaacgctagctccgatatacgatagcttatcttaacctctttcatattacagttactgtataggcgggcgttatacatatacgtataagagctatttgctaataaatgtcatattataggcgaacgatagcgaacacgttattagggcttttcacatctagactatttagtaggccttgcgattacagaaaaaagctgcgaaggagagtcaaagcttcggcgtattttcgtgtttccatatcgcgtatttacgttatcttattgtaagctaaggctccagctaataggacttttaagtgggtcaaagttgaacccctataataggaaatatcattttacttcaatggtactgcgtttatagtaatacgaataatacgtttttagctataaatttactaatatttatttcgaataactttaaagggagagtataggcataaagggcttatctgtactatagatagccgtaatataaggttcataggtaaaacattcaagcgtactatatatatatatatatataatatatccttagcttcacatatcactgattctatggcatatattacagtgctaacccaatttgtacacaagacactaccggtatttccatctagctaccacccacaccaatactagaaattagcccaaacagtaaaggctttctttatatactagcgcttaaaggtcaaggtaagtaatattagtcattttacctaagccaatatccgatcaccttccttacctatcaatatattcgggaagctaataccttacctaatataacgcacttatatgcgcttaaatgactcgaggttataataagcagtcttattagccacgtttactagtatcttcagttcgcccttatcccctaattactcgaagagtttgctctgattggttagtatatagtggggttaactaggcggttaaggcttacgcgtaaaagctcttccggtaaacagcagcttttcaactccttaggcagacctttagcttcagtactctataggtagtatagaggattctttataatcagcctttttacaacctcagccaaagcgaatagctttagaattactgcgtctatctcggctatatcgatttggcagctatactctactcccgctataacatagaccaccgttagtaaactatactcatgtggcctaccagctatactcagtttccctacttaccgatcctaaccctactggactctataagtaacatggtatcggtacttaaggcagcgagggctctcccacaaccgcgtaggtattaaattcctttaaggacctatcaggtataagtaccactttctcatatcgggcgctaagactagtacttaccagccgaataattacagcaacctcacccttagtaatagtatacctcgatactaggatctgacttactaagagctctactgactcctagactaaaaatacctaatcctcccaatagtagcaccctaatagacctagaaagctgggataagagaattgactcctggtttctaacagtggcttaatagacgaaaactgctgctttagaaggtggatattaaccagagccactttattgtttctataccaggccaagaagatagactatccttaggaaatcactacgatcgcctcatatgtcagccataggttttagaaaaccggctgaagattctaagcttggtcttgatccttcagctacactagttcaggataagccagagtagaagtagttaccgctaggtcgggctagggcctagaagacggtacagatagataggttggtttttttaaagtagcctaatcgggtattccgtcacaccatacagtaggaggtctagatagctaacgctaaatggaatctatcttagaaatatgtcgagtacaaggggatagctttaatttagcagtaccaggaaccctaagtagagggaaatgttacagagtggttgaggcatccaccctatttaatattaatagagctatagagataactaccaccctatagaactagattaatactaacctattaaagccgagtataggctattatatagatatctaacgacatcagtaatcaagcgttaaaagttactattatacaaacggtcgtcacagtagaaaccggccctatcccacaaaaatgtataggttcaatgtttatatatcctagaattggaataagataaggtactgtttgtctttacttagaaacgatagtatatatcaccctaggtaaatcccataatatcgaataaaatagtctcatatattcatcagccacctcttacttatctgaaatctactcctacagccggaagtaatcgggaacctatctctgtcgagcagatcgacgaataatagataagcttaaggggatagagaccaggaaacgatctgaataccgggtaagccgaagcgattaaagctacgagggtactgttagaataaccgacccccctactatatatatgacttcgagaggcatttctatagttgactcgctagtaacatctctagccaccgaagaggaaaggagagcgctaaaagatccgtggcatcgactgtatccataattagtaaatagaccataggaataaagggtgataagttatatactgtatcaggtaagaggtattattcctaggcaaccgataggcaagccagccgtctatataccctaaatgaaccacccccttacgtacattgcattacagtataataggatcatcgctatcttccttaaagcagatcggacatacctcgccatctgaataagacccttagtcgaagctataaatctagatacagtataacccaccgtacttattgttaatagataggatggctagatcgttcggtaaaacatcctagggcacccgatccattgcaagtatatctgacgtaacttcacaactaggagactgagatacctctaaccatataggggcaggaagtcccaggaaggtgatctcgttaatatcctatatcggaggagagagtgtatatggcttagaagaaattccagctgattcctcttctatattatcaacctcttcagctatagatagtgagaaaagatggcgcggagatatctacgcgtggacttggttacacacagctgcgttaaaccaccgctttttaacatcgttctattaacgttcttaatactatctcttacagaggaaaaagaagataataccatccagctgagagtcaagcgtagaaagatcgaataggctccgtacaaggttgttcagcttataccgaccttctttcagggtctctttcttcacagtgagcttacaagcatttcctttctaggtaatgccacagcaggacttatcctccctaaggggccccatctaacagacagccaaggggtcccaaagctactaagagtctaacatcttaagcgcagaatatatataggggagaaggattcaagcaaatctaaaatacaatgattatagtagtagaaagtcaaaccattgtaaagatctagttaagtatatatagtaaacattttctcttaaccgcaattataatacgtattagctatatagaacgcaacgacaattcccgactcccagggcagatagttatattcccgggagcactcggtctcctaggggctaaacaagagttcctaacagccatctagcgtaccctaggagctaccattatctataacattcaccaatagccgtaaaggctctatacctcttttagaaaggtacttagaccatctaaactagtcacatataaggctccactgtgccctcgaagcactttataaaagcaaaattcttatataactaaagatatacacctttcagccacttactctactttaaaaatttcactttaagttaaatcgcggtcatcattatatctacagcagatactcttttcatcgctacaaacatagactagagctctaactatatacaatcaatattcggtcgaattatcggcgatcccacttaccgtttagaatatatataggtcgaagagaatggaatttattactgaaataccgtatcgaaagagtcaaggagaaatagagcaatatacctcaagacatttcaagagcttcttatcggcaattcacctacattaagactctcaaaggcagcaagttatatactatatacagaatacagatattattcctctagggccaggaagtatacccaactatagatacatttacttcacacttaagccaaccaagttaagagaaccacaccaattcagcaacataactacaaccacaatccattagcacatcactggccaactggtatatcctacggcattagcagaaccgaataccttctatcagcgcctctatcttatcatataacccataataagtttttataggcggtaaaatagaggcagaaatctctcaataaaggatatacacaacgtactcttcgtacatccagaaataccagagatcgttacatcgaggtcttagttaattatttacaaacaaataggccttatccaaaccgttcggcctaataacagccatcaccacttaaccatagtcaaaacaatatcctcttccttactacctcctatattacccttttgaccagatttccccctacacggtaacgaccaagcttattagctagcctattaatagcgctagccccactacattccccagaatagcactcgcctatatctatttagcatgaatatatattcaatcttactagagtgtataccaaactcagagttacctatacgtaggtgtaattcctagggtctatcactaggcagtaactctagtaatagagctatagaccgccgaacgtagtcctattcaaatgcagcctcaagggtatcagaagcaggcttgattcatagactagttttagcaggccttagagaatcttcccccagaataagctaaagctcttgcgtcagcttctaggtaagacgaaaatccatatcatcttaaattaaaatggctctatggcttttttaaaaaagtactatgaaataaggaagtaacggtatatatccaaacaaggatatatatatatagaaacgaacccgattaaaatactaccaatactattaatagcagaaggtcaaagcagatcctacgtacatataaccgttagtaacataaggcttactgtttatagcctcagtcaagttagcaaacggatatcaacatataggaaataggaactatacacattcataccatcgtttagcattaagttagctgctctgttctacaacctttataccatcaatttccgagtcaccgacatctctatcgctagtatctaactcctatatttccaactgctttaacaacacatcaaaaattacatatattaactccggctcatgaccaggttccttagcaccgcgctccttcaaaagataaattatcatacctcccatcttctgagtaagtttatagaagatatccgccaacctagatatatggtccctatcctcaattacatgttttaaggtagcctgcatatcacctagtgcttattcgagcttagtctaggctctttctacccagacggcccgagtgtccaacctagcaaggatacgaagatactcctattctcaggttagataggcttctaaggaatcctataaacctaccaagggatccatattataggaatagtaaggaccaagtcgtcaacagtaggcagcttaaaccaagaagcagctcaacagttctatatcaaaaaaggaagttttactagcattaatagctttatatccatagctatcttctaactaaagccgtctcggacccctaatagacttccctttctgcaagcttttaacgggccatattagcttatttctggccatatacagttgcacgagtatagaaactgccttcaagcctaaccatctgtaatgtaaccggccaaactttaaatccagaaacctaccagatctacacattaacaataacagactaggacaagccacgcaatttttattaatacccgttagttcttatggcgcactaccctagaagggcctcccgaggatatttatcacaaattggaacttcggcgtcaaagcttgtaaggacagactctctacctagagagcaaaatacagccctaattctaagaaaagggtgaagagagaaaacagaaggagaaaatccaagggcgccacctgggaaaagtcgaccgagccggtatcatataggacagaatctaggcataccagctagtccaggccaaatcgcgtaccgtaccctggtatacgcctcctaatcacagattaatagaaattataccacaggattaaatttaccggtagtccacaatatactttcgatttctggttaagtggcggcactattaaatcgcgatcgactctaaaggtagagtaccctataagcctccatatatcagaggcaatattattcggcctccctaaatggtctctaaaatgattttaaggtttaacgtcttaagcatggaccagcacgcggtctatatactctgtattgctctaaatacttacgtcatatatcatactatagaccttctctagcaattagccgcgacaagtgtaagccagagtatggttaccgtttctaggccaaatagatctataaggtcgcgattaatcctatttagaagacaaaattaccactattcttctaattattagtaggactctatcccccacgctaactgaatggtctataaaacgccggacaggtcaaggcacataacggatagcgagagccggatataaggcgaaaattacacgggccaggcaacacttagattgttagaataagtatagggttagtattctagtgatctatttattaaggatatttgtaagggctgcctaccggtatatagagtgctctatctcatataacgctcagtctaaccgcaggatcactagtaacggaacatcacaaccgttaaggagcctagcggttaactgatagtaaacagaaagcagggagtaaaaccggagaagaaaatagtcaatagccggctaccggaatataaccatatctatgatactacagggataaccgtttattacaggcctatcgtctctagtcaggccggtaaatagattttctccctaacctagtaacctcaaaatattgcggtccacataaatcggtagtaaatctactcatttcgccgtagtctagatactatccagtaccaccagagacctttaaagctcgcgttacccacctaaaccggtaagtctagagcaaaaaaccgtttcttcttataaaagcctctaatatcgtaactactttcagaggcttaacgttcaacatgccttcctatagatcggcaccccaagcccccgctagagctagctagagcattcctgagtcaaatattatccccaaacgcgctcggcagactactatcactagacctaatactacccctctgtcaggcactcaaggcacacacctacagccaccgctagtatatcctgccattaccgtcctgtgaatacaagtatactcagagctaaagcggaatctagtctccctcgccgatagctaagacccagaaacaaaaacattagaagattattcatcgactatacttataggtttttaaagacactaatagggagcgggacaagtcaatactttctatctagcgactagaggccgataacgcctaagccgcagcgaagatccaccagctaagcatcgaaaaagatcagtctctagtcacagtctaggtatttaagatataaatatagaatttaaaacagcaactagagaccgcgcagctcagtagtatagcgagtgatgacttattgccttagctgatacagacgagcgccgatttcatgattacatagaccaaactttctagcagagtagaagcagagaaaaacaaacgcctagccgcaaccctgcctacttctaatatatttcaaaggaactagtaagcctagaataggcaccttagaatacttgataccaactcgcttctaagttatttactactaagtacccttccgttaaccaattaataaacactggcctaagctaaccaacaagcaaactaataagccaaccaatatatatcgcccttctaaagataggcgtagtatagagaggaagataggtcgctttacagagaaagccatactatcatagtgatcttacgggcttattcatctagctaacatacaatagatatatacgtagctttaggctagtatataatataatttatacggctttataggtacctatcttataaatagaggacttagggaatatcgttataagatctacagttagatagatcatatcgtagaatttaagtgccgcgaataaactatagctaccggaagaaccctaatatcggcgtaatacccttagggcaaaggggaagcaatataggtatatattcaatttctattctcttatagctctgacccttctacacagagctcagtaatcacttcgattagccttttatagatatcttggcgtggtcttagcgtggctaggcctggcattttcaggggtaatttcgaaagagggctagccgtgatttacagatccggttcgcagatatatttttatctcctatccacagtcgggcgacgccttaattgccttccttactcgtcctttccttttatacgttttttcccccgctataatagagaaataatactaacggccctattatctagagattaacttatataacctacatttccttatagtgatacctatgggtgacctacttacagacataaggatacaatagtactaggggaacgaataacatctacgagatttggttggattaacgcataatatatcacgtattcctccgtaatacggtgactggtaattcgggccagatttagtctagtactcggctgtacgccaaaatatccgatcagaaccgggccgcggcacgacccatatcggcacggatcgcaagctttctttcctcgcatacatatatggcgtatagtctataagtcacaatccccttgatctaccgctatcacgttgacctcacgttatttatctagcctttaggcgttaccagcagccgcgaaccaggagttattgtactagctattgcgctaattattttggtatccagtcctactagtccttgacaagtcccgcagcaccaaggcaattttggtgctgcgatatggtgctgcgaggtgctgcggagctaagccaattttggtgctgttgtatggtgctgcagcaccgtcgcagcaccagttttagtgctgcgctagcataattctgccaagaattacccaaaatggatggataaaatgctgacttattttgatagattactgttttttactcatgtattggcattgggaggcagttatgctcactcactactgagattcgtatcaactcacgttcaaaaaataaattaaaagcttcaagtactatacaaatgtagatttaaagtaaaatcagcccaaaacagtatagaattagtggttgatattatatggaagagaatgtgctggtattgtgtgtggatatatatatttactctatgtatataccttctagtttgtaccttgtagtttcgattttatttttctacagtaaaagcctatatttcaccatttttttaaatagtatagtgctgcgaccggatgaattaccctatatcttattttgatctttataattaatatattgtataggctttgtataataacttgatgtactgtctattttccgaccgaggtcagaaaagtggactttaggcagctatgtagaataaggggataatgtagaccccgaaatacattatatcatagcactatatcgtggtgctgcgggagtgctgcgggagtgctgcagcactacggtggggctattataggagtcggaggtacatagccaatagatatcgagatttatattcggctttatgatctatctaccactatactaacatagtagacgctctccctgtttattgttagttgtgtcggtcgcagattttgtctaggtaggccatttgtgctttctgttttcccctttacctcacaccatatacctatacataccatttgcccttaaccttcaatatgtcacattttggacagtacgctgaggctggcccttcttcgcaggtatcttcatcgcaaattggatatccagaccgccttaccgactgcgactttctttcatacgatttaacacatgatccccttactcctgaccagtcaatcagccaacaaacaccaaatcccgaagccccctcaatccttagcattccagagttccaggctccacatactatcactgctccaacaaccctcgaacgaattggccctggagctaagaagctttgggtgtgctatacgaagatgaacaaaacacaatttattgagtggtggcgacacactacacacgcccaaccaaatacttcacgacgtaaagtgaactttgaagcgaattatacatcaccacattgggagcacttcgaccaggttgcacactatcagactggacagccgatggcactttgtcgacgatgtggaaaggcgattcctcatccatcacagtctggaggtcttcactcgttaaaaaagcaccatgagagcaagacctgtcagcagggtggaaggagttcttctcttcagcagacattaaggcaatcgctacagtttgcggtaatatatactatcatatctcaaaacgaactatatactaattcaatatatcttagtctgagtgtccttcggagcagaagaccacttttaatactgaggattgggaacgaattcaaatcaatttaatcacaatgtgtcagctccccttccagttcctcgaaaggccggaaatatttaaatttgttcgatttgctcgcctctcaaaagatatacctccaatcttgactcctaagacagcacggcgtcgcctacaaatgatggtcaagggggatcatcaaaaggccctttctcttttaccaaagaatgctaagctttcaatagcacctgactgctggacttcaccttttcaacaagcgttcatggcaattactggctattttgtggattctggctggaattatcatgagatactactaggctttgagccagtatatggtcagcatactggtagtcacctgagtgagatactacaggatgtactacagcagcatgatattattgatagagtgcttgcggtgactaccgataacgcctctaacaataaaacacttatggagagccttcaccagtcgatcgaacagctcaatctcccagatagcacacgagttgtacgaattccatgccttgcccatgtgatttagctcagcttaaaggacctccttggattgatgaaagccaacccaaacaatgataccgccgatactatctggtcggaggaagagaacaagtcggctcttcaaaaggccaaatctgagaaaggaatcatctatacacttgcaaaggtcagttattcaatatctttattaaagcatacttacaccatctctagatccgtgcttttgcagtctatgtcaacgccagtccccaacgacgggagttctttctaacactacaagacagtgagccgaagctcgtaccaatacaagatgtacgtacccgctggaattcaacatacctaatgcttcagcgcgcaaatcgtctgtccgctacatttaataggtactgtactctatataaccagcttcggttccagctaagtgcacaagagtggcggcaggttgaatacctgctttgtatcacaaaacctttttacatatggacagtcggactatccaaggttaaggatgtcactattcattgcgtgttcgaggtatataacagactgtttggacattttgaagactcccagaagcgcctacatcggaagaaggttccttggaaaaaggcgatgctttgtgctttgaaggctggagaacagaagcttgcaacttactacaaggatactgagaaggctcatgggcatctttatgcaatggggacgatccttacccctgtgcataagcttgactacttcaagggagcagactgggctggcgatgatgcggactggtacacagtatacgaaagctctctacattcctaccttaagcgatactatcagcgccagcctacaactcaatcagtagataaaggcaaggctccacaacgaactgggagtatgtctagtctacttgcacagacccgaccgagatcagctatccaagagaaggttggctggcgagaagagttaacaggttatctcaatcttcgtatgtataccatagaacttgaaaccatgatatatactaacttcgcaaggaactgatgatgatgacccatgtcaattctggaggcaacatgagacccagttcccaacccttgcggcgctagcccgggatgtcttctctgttcctgctactggcgcaggagttgaacggttattcagctcagcgcgggatgtctgccattacagacgtggatctctcaatgcaacgaccattcaagatctaatgatgctccgctgtatgacgcgttttgatgcgaaccacactcaaggccagctatctacagaaagccaggacccaagtgagaggatggaggccgatgaggaggcagaggcccaactatctgattatgatatggctggtatcagcgataatgaggaacttgagtctgaaactgaatatgtatctgaagccgataacatggacgcccatgatcgtgatgcttcacctggtctccaggacccaggcctacctctggatcaggagactctggatcaagagactctagatcaagagatagactcagttgaacttccaaatcatcacccaatagttagaattgtacaaagcgatagccagcgtccacatagggaacggaagcgtcggagagatgatgatgaatatgtatatactaagaggaccaaataaagcgcaaataatcaaacaaatatgataatgatcttttccagatttcctgtttactgtaaataaaataccccaaaattactggcttttctacataacttatgcatgtcacgaggttagtcgtgtttgcactgtttacagtgctgcgggacttgtcaaggcctaatccctagcgacagctcggcagctattcatatcgacagtggcgccggtcgtagactacgcgtctaacgtctagatgtacgcgtataaagataaggctattgggccgatcaaccgcgtctaaaggataggagcataggcgattctaggaacattcctcacagttacgaccaatatagcagaggcggaggcccaccttgccactgttcaacaccgtttctggagacgagctgtgaagatgtggacggacatacataccctgctagaaaccaaccctctccgccggaacacagcacgcatcaagaaattcagaagataccatcgttcgccgctgtatcaagtagcagacgcgctaagaacattgagatggaaatactggaaaccatcaatccgttcacattggcaccataggaagtacgcgtgcaggctgacgttataccaaccccgcagtcaccgaccgcaccaggcgggctaatgcagatcgcaaccagcagttcggcacggaatgggctggtcggatttggggtggcgatcgagaggcagctatctcggtatcgaaaactaaaactgaagaccctttccgtcacattgggtgcaagagcagagcaaaatccgttctctgcggagctagcagcgatggcacatgcattgaacatggtagttgnnnnnnnnnnnnnnnnnnnnnnnnnnnnnnnnnnnnnnnnnnnnnnnnnnnnnnnnnnnnnnnnnnnnnnnnnnnnnnnnnnnnnnnnnnnnnnnnnnnnnnnnnnnnnnnnnnnnnnnnnnnnnnnnnnnnnnnnnnnnnnnnnnnnnnnnnnnnnnnnnnnnnnnnnnnnnnnnnnnnnnnnnnnnnnnnnnnnnnnnnnnnnnnnnnnnnnnnnnnnnnnnnnnnnnnnnnnnnnnnnnnnnnnnnnnnnnnnnnnnnnnnnnnnnnnnnnnnnnnnnnnnnnnnnnnnnnnnnnnnnnnnnnnnnnnnnnnnnnnnnnnnnnnnnnnnnnnnnnnnnnnnnnnnnnnnnnnnnnnnnnnnnnnnnnnnnnnnnnnnnnnnnnnnnnnnnnnnnnnnnnnnnnnnnnnnnnnnnnnnnnnnnnnnnnnnnnnnnnnnnnnnnnnnnnnnnnnnnnnnnnnnnnnnnnnnnnnnnnnnnnnnnnnnnnnnnnnnnnnnnnnnnnnnnnnnnnnnnnnnnnnnnnnnnnnnnnnnnnnnnnnnnnnnnnnnnnnnnnnnnnnnnnnnnnnnnnnnnnnnnnnnnnnnnnnnnnnnnnnnnnnnnnnnnnnnnnnnnnnnnnnnnnnnnnnnnnnnnnnnnnnnnnnnnnnnnnnnnnnnnnnnnnnnnnnnnnnnnnnnnnnnnnnnnnnnnnnnnnnacactcaccgggaaatatatccttcttcctaggaggaaagtcgccttccgatgatcagaagtggacgccgaacttagaggcggtacggacctcaatacgattcgccatcgccacgggccgactcgaggccacctaaccatgccgacgaacataaatcaccccactctcgccgatctaacccaccaatcacctcgtgttacggatggtagacgcgcttcaactgccgaaaataggatgttgaacacttggagaagcgccttcaagcctgtctactaacgaaattactaatccacgaggatccgctgcgatacgaacatctgagatgacatattttgcaagactttttgtatgggctctgaggagacacagtgctatatatattatgacatgtatagtagatcagagatagttgccctttcggttcagccgccgggcgttaataaattgtgtgtgtgtgtaccaatttcgctgtactcattccgttttaccggaatctctggaaatatcgaactcttttggagggtaggttaccacctttttctcgccgagtgcagcgtgaaatggacatccaggaacgactttcttgtgtcgttgaataaaccaaggcgcaaattcagcatctattttgcggtaagacgcaatttcctgcgctttctctgctcccgacagcttttcctgttgttgccagtaggattctgtggggtctggcaatacggtctccacaaacaacatgaaggttcccaagagaaaagtgatgaaccaatccaggattgggttcacaggttcgatctggcacgccttcaaagttgtgggcagtgacagacaaattgcaatccttcgacccagccagcgtaagccaggcgggaaaaagcggaaggcaaactggtcaaagcaaccttcggccacaagatttgcacgctcaggtgcgatccccatgtttgattcgacttcctcgttgtacctcataaggtcatcccagtcagtggggaagctgtggataggcttgccctcaacgtggaacaatttggacatctcttgccaaaaaagatgagatgcctttttctgtttgtcgctaaagccaggaaaacctagctttagctttagacggtgcatagttgccgccgtgtaggtcaaggtatacacgtagtcctcgttgtgaccgaagtctcccggaaattgcttgctgtagtagacatggagatcattgatgtggttgactgatttctttgtaagagggtgatgaggtccatgccaccaccagattgcattgttgttggcagtctgctcgactctctgggtagccttgtagacaatttttcctccatctgaccgccagactgcacgagacccctgctcggtggcaatgaagttcgggaatgtgattgcgtagacaagattgagcataaattgattcaacccatagccggcagacagacgccaaatctcttcgtagtctttctcggggtctagtgattcgattctctgctggatccaataatatgggaggcgtgcagttgatgaggaatccatagttgattgatttgtcatgtgggatattgtgtgaggcacacacatggaaagatgatggtcagtagcaaaactgtagcgtaactgtagcggtcatgcgcgtatttatttaatcgcggagcgattaaatgacgctcggaatgccgcacggcattacgtcaatcagttcgccctcaggtcggctgatggagcgttgtactccggctcagcctgcgacaacaactggtctccttgagaggctgagtggtgctacattaagttgaagagtgggccgatgtaatggcccacggggagccgccggaaacgggggacggagccgagaggattcaattcatccgatgcagattctggttattctggttggctagcggccttcttgcattttactcattttactgccaccgtggaccaagtacaccggaatgccgcggagttagatccacgcacaaaattggatcatcgaaaggccctggagataccatagcaggcagtggccggggaaaagccggagaaaagctgggtatgtaacggataagtcggctggattggttcggcttttgctaggttccgctgactaaagttatattggggagccacgtcccgaggcccaggactgcacagctacgtgaacatcgcaaccagtgatttgccggttagatattcctctagatccgcaaaaatggttaaacagggggatttcagcggaatcgactgcagtatatttgcttaaccctcctttgctttctcatttcctcatcagtcttggtatactggtaactggtgtttcaagaaaaacccacatagtcggtgataatgcaacttttaacttcaattttagactattgaaatccatggcatagaaaataggattacagcatgatatacaatacttacacagctatgcagacgcaattccctacatcacgtcctattatctgttgaaagtagatgttataaagtcttcgggaaatgctagagcaaacacacgcaacaattgccacaccaaagcataacataacttagctgcttttgagtatatgagattgagcgatgcgatttcctttcataaggtctgacaaaagctttcgggaccacaaggtcaatttagcattactgtattaaatgcatgagattacttttcaagagcctttccttttccttcgaataaatattggcatgcattgttatccgtggggaactcgggaatcaggcccattaccggtgtcggcgcaataacgccggtataccggacgatttattaatcctccatgttttgtaatttatgctatgtataggcttctccaaaacccaacttgggtccgacttctataacccaacccaacccaagacccaatactgggtaccctagtcccatctcttggcactcctatgggaccaaatggtgggagttggcaaggtctataaccgcctactaccctataacaccactattctacacccgcctagcacttttagtcatcctccggtcctaatattaacgctcgacttatatagttattcccttcgtttccactagcgactaaaacgacgccgaaaatagctcccctttagctaaatctaagtccccccccccttttcgctatcagtttataaagatatactatataaccttacacatagatatcactggttatggtgtgaagcaagaactctattagataatagaccaataataattaactatataagaaccacaacttatatacatacgaatctatagttcggctctattactaggaatggtttaacctcccggtaactagaactcgtttcaatacgattcaataattgaaacaaacgaacctccacgtttgcgccgcagttgatgctgtttcttcacatatctatatatcactagtttgccacctgactgctgtctcatcagaagttaaaagttaaatagtatcctgtcatcccatgaaatattgtgacatcctgttcctctgcgccccactgagaaatgttaggctatttgcaatacaacagcaattgtcttttgcactcgggtatctagggaacttccatggttcgctggcccaagatgatttgaacccgaaattgattgcgaatgcacattttccttgccatttgacattgttgttaccttagggaaatggatgataaggtctgaatcgtaggggagtaagcgttgctaaaattgacatcctatgaaattgagtagagaaatacatgtatcatcaatctagtttcaaagcaacaatcaacggatggtgttcggtcttatgaccaaaatctgtgtcaaatcgtgtaaacatagatcaccttcctcgccatttccatctgccctaagctctgccctaacccccaacctacagatcctcgccctcaacccaattgccatgcagtccctgcctcaaccgaagcggcagcaggatgacagcctttgccttggtgaactccctggtatccagcaagtgcaactcgctgcacatagaaatatagttattcaccagagccataacatacccaccgccctcaacggtagatccgcgccgcggaatgaaaattggttcttgcaccatatgtgtctttccagggaagtagatctctgtcactccagtttcaatatccaggtgcgctagagcgttatacagcgggtgtccaccacccagctgaggcatgatggtcgggaaatcggttccgagggcagggttcattaagtcaaagaagcagtgcttgtacggttgggcggcgaagcggtcatcaatgcggtagaactccgagttgtcgctttggagaaccgttgagttcaccaagtcgagctgctcggagttggggttgatagtgaaccgggttagctgggagtggatggaactcggctcaggagagtttccttgcgcatccggccaccaaaagaagacgttcttctcgctcagtccgaggtcgagtacgacattgccggattcgtcttcgtaggcgttggctacatggcccgggaaagagttttggtagcggaaccactgggagaggtgacaaatgatgagatgatggaaggagaaagatagggtgcggggaacataccttgagactggatggctttgctcctcgtcgtggaaggactccaatatagaatggagtttcggggctccactgccagtgctcgccgccctgcttcattctctcaatgtcacagacctgagggatgacggggaaaaggacctaaataacaagggggaacaatatcagaagaggattcgctaaaaatacaagaatcactactcacccagttctccgtgacagcaaaatcgtgaatcatagccacaacaggcgcagtaaaccacacggtttccaagaactttccgtcggctgcaatgcggtaataacagacatcgggtgttccatcgcccttggcttcatatccgaagcagaccatctcccccgtgcgcgggtcgaatttcgggtgtgcggtgaatgtcaaactgggcaactgtccatcgaagtcgtacaggccggttgtctcgagggtgtgaggattcaacgcatatggtggagcgtcttccttcagagccaacaatttgccgttaaagtgaacgacgtttgtgttggctgtggtgcggatctcgaattgcacggcatcggtgaatttgttacggtatttacctacagaaagaaacgagttattagttatatgtgagcttgtcaacggtgagggttagtaccaagcaatgctctttgggcctctcgttcccggacgaacttctctgttcggacaaaacgctgcttgaaggagaccgagccgtctttgattttgaaggcgctgatactgccatcgccattgaaccactgttgtcatgtcagctatcctgctattttgggattgaagattcgtatcaattcgctcactggatcattctcgatgaagggcgagaattggggatcgggcatcacccggtagaatgtcccatcaatgtcttccgggatctcgccatacacctccagattcagaacttctccttccactcggcatggcttcatgaacccggaaaattgcgggcggtttgggaagactttccggggcttttgagaaagaacggacattttggttatctcgaaggcaaggaaagaagatcgtgtgtagtagaaaaatcgtcaagtgtagacaatctcatacaagaatttactttttatttaattatcacagaactatgaagtacaaccttgtgtcatctacacttttgtttcctccccgacggaatagcggggatgctgcttgtatacccccggtatccccggtgggtcattttccacttacacatcccaaggttggaaatataggtgatcatttcaatgtaaaattcatttcgatcgtgccgggtagcttagccccgggtgttccggggcttactgtatattgggagaacacagggtatgaggaattttgagccacctgccaacgctgtattgcatataatctaccaatactccgtatactttcccaatctacgatccacgccgtagatctttcatcttatcaatgaccgtgttcttgctcgtcgaactttcatttctgctcaccgaataaaaccgtggaagctacccataataagctaggatacaagactgctatttatagtatgcaggaacaggctcatcgtcattaaatcccccttccgtacatccaggaagtctgtgtcaattatctgtacacgctagtaatttaacgttttcttttaacaatataataaattactttgtgaaggcctaatgttcatatttggtttattgggttaaaaaactgcgatagacttatatactaatatataaagcctattcttgagcctcaaaaaatatattgaaatgtacatccaggtttcaaccgtaactgtattacagtgcgtaattgacaatttaggcaaatagtttttttttacaagatggggcagtactcaggaatatccccacagcatgtcatacacgcatcaatttgtaggtgcgcgctgtgaagaagcaacggcaaatgaaaaagggggctgttcccccgcttccaggcgaaattccccattgcaaccgaactgtgattggtcagaagtggaccccagatctttcacaagggcaactcccgacatattccgaggtttccttactccgtaattcttctcataattatcccatggcagaccagcgtcctcagtcttcgaccccgggtgattccgacatccgaccgacaaaaacgcagggccggaaacgcaagagagtatctgtggcatgtcggtcctgtcgggtccgcaagtctcgtgtatgttatacgatcgccatatattctagagttgatggctgaatttttcaatatagtgtgatggtgcacgaccgtgttcgacatgcgaagttatggacacggagtgccgatatgagcagccgtacagccagcctgtagcaataactaacggcagcagtgagcggtgagtcaatctgttcaggatgtctacacgatccaaactcatccgtgtaggcaagaggagagtctgctcgagcagcgattacaggcaatagaaaaaaggttgcggctatctgggccagacaaggaattcgatagccctgaaatgcatacagccacctctcccacaattcaggagaaccatgaatcccgacgtagtccgggaatgaaagggccgctggatcaagacgatggagtggatggtatgggcgccgtggcactcaaagatggggctgacgaagaagaatattttggtacagttcaatttatcactgcaaattgttttatgggaccctgtctaacgatttgaaaggcgcttcatctaatgtggccttcttgcgcttcattcatgccgttagccatccggtcaaccccgccgacaatttacctctctcaagcatagatgtttccaccgaagttggccaatcaaacgataaccgcttcgatgcattcctaagaagaccatcgggtatcagcagtctaactgagtctcagggaagagttcgcgtagatcccttcgcgcttccccctcaagtggaagcagacgccttgttgcatttatttttcaccaccgtcaatctgatgattccctgcatctatgaaagctcgttccgagacacttacaggaagttgcagattgacgggattcggagtgttcggagatcctggctggggactctgaatgtcgtgttcgccctcgcgacaaatgtcatgacggcgacttcaccgaatattgaaagggccacgagggccagtatttattttgagcgggcgatggaattggtgaaatcagatattttagggcgtctttcattggaaatgggtatggcacacatttaatggcttgcgttcaactcacactgacgtgcttagtgcaattattccttttgatggaggggtaccttgaaggaactacatcttcatcgcttgcctggacgttacatggcctggctgtgaaaggggcataccaacttggtcttcatattatggactcgaagagcatgtcgcaaaccgatcgggaagtgcgcaggagatcatggtattggtgtgttatgaatgatcggcatgtgtctgtaattccgtatatggcgaagtatactaatgacgatcaggttcctgagcgtgacttacggtcggccccctttgattcccttgacccatgtgagattcgaggccagcccctatataacattcagcaatgtgcccagtggtgttaccgtatccagcctggcttattttgatgctatgatgtaagcaaatttccctcgaaaatttctgcagttttgactaattttgataggtctattgctcacatcatgggcgacgccctggagcgtctctatgaccaaaatctccgggcttcccccccccccnnnnnnnnnnnnnnnnnnnnnnnnnnnnnnnnnnnnnnnnnnnnnnnnnnnnnnnnnnnnnnnnnnnnnnnnnnnnnnnnnnnnnnnnnnnnnnnnnnnnnnnnnnnnnnnnnnnnnnnnnnnnnnnnnnnnnnnnnnnnnnnnnnnntctggggcttcgccctcgtctccccatgagtgaaagcctcaaccagatctccaaactgcgctgggaactagcccagtggcaggataatctcccatcctgtttacaaataatagcctcccaggacacgctggatgatgtccctttgacggtcggaaccacgagactccgcgtcctactttctctccgcttcctcggtgcgagaatacttattctacgcccagtcctcagtcaatttctcgattttccgggtatgacattttcgaacgaacatcagtcggaatggctgcggaattcaagtgcagttttgctagcggatttagtccgcacgtgtggcgatatcctacaaatcagcaaaagtatcttagccggttccaggaatgatcagaatctgcttggggcttggtggttttcttgttattatagtatgcataccctagttcttatgatgtgtttgattagtactaaccacgcgcagctttcaactcctccctcgcggtcttgggaatccttctgataaaaagaatcccggcatactccgggcaattatctacattttccgtaactgaattgcgaagtctgctagagacagctatggaggtcctacgtgggctgaacaagggcagtgaaaccgtcatgcgctgtcgagatactttgatgaggcttatcactgcgtttgattttgatggtaacaatgcctatccatttcttggtaccacatatgactgacaaatcaacgtgccgcaaatgtagccggatttacaccagaatcattctcactatccccatccagcgcgtgggcgtggcaatttgttaacccgggcttgttcagctcggaggcatcgttgagtcttgctccagggacggttgatattgcgtctggctctcagtttccaatatcgacgaatattggagtgcgcccagagcatgacatcttccatctccctggatgagttccaccgtatccacctccagtcgaggaatgactggcggaatcggtccatgttgttagttagagggaaagaggtatctacctgatcggccgaacagttatcgagctggatcgctccgtgttttgggtcagagggcatggaggtatcgaatggcggaatcggcccatgttacggctgagacagcacagtgttttcgaccattccccacaaataatgtggttttcatcagactttatagctgcgtggtatctggtatgatagggcctttttcgcccagttgaagtcccaagggaggtttaccgctgaactcggacctcgtaatgactttcgcggtcgcggtaaggccattgcgaaaccagtcttgccaaagttaaagatatatccctccgcgataccgtatttgccgatgatattacggacgagattaaacgactacctcaggatcatcgcaggctgctcgctggtaatcgtaccctcgcccaacatctatcctcacttagccactattcccctgctcctacttctttgaaaggggaaggatactaacaaaacaacctgccgccaccatttgacgtgaacgtgtgattatgcgtacctaagcaagtttacattgtacaattatcttacttggcatagctatctttagtcaatcaatggctaggcttgacttagcgctttgcctttcccctgggcgttaaacaactcgccctgactggccatagtaccagaggttgtgcgtattctccacttgcggctcgtgtgtgcaggtgattggtttgttgaaccatttgctgatcacttaattatgtagcacgctacctgtttgcagtcctgacaagaacaactttactagatcttcactctgaatatcttagttcacaggaaaatcgaactcgccccaacgaggtgaccatattcccgaatacacgtagctaaacatggatgcacggaatatatatgcattgacttgcgtacattgaacccatagggttgagaacatgttgcaagccagccctgctcttacacacataaagtagcatcacttctcttgcgccttctattatgaggctcatggaacttctgctcgtacttctgtagaacgtccattcgcatgtactgtacgatcggaatttgtggaaagctattcacgcatctatggaacaccttcattccaaatgcccgactttccgggagaaagcaccccattgggatccagcacatccttcaagcgtcctgtaaacttattgaacgcaaagccgttgaagtccaacttggccgcaatctggtccatgtagcgcacatgcgtgcggtactccatatatccctgctccgcaccatcatgcagcaagttcctgcacaactcgaggacgcgtgcctcctctctggacgtgtagatgaccagctcgatgccgactacgtagcgcgggtagacatggaagtcggcgaagaagtcgaacttcgcgtcaatggtgcgttgcttcgctgtcatgtaccactcgtacaactcacgtccggatggagggatgatgggcgagaagtcgacgtgtgcaccgcccttctcggctcggctgtcgacgatgcccagtggggtgagcgttgggatgccactgtgcggaatctcttcttctttgatctctgctgcggtgatggcgcggcctggggatccgggaaactcgcgccattcgatcttcacacctgggatcgtggagaacgcgcgttgcacggtttgaattaacgctgggagcatttcgactgagccatatagcgagaagtaggttttccagaatccccagttatgttccgcacggatttcctcgagtacgctgtaaggtacgtatgagttgggctccatgtacggggccagtttggcgtgaacctcggggactttggatgtaagcgcgatgcggaagatgttggcgatggaaggtgagttgaggatgatggagcgccgcatcaggtctgacaaagtcccggtgagagggatgaggtctgcttccttgggaacgctgacttcaagagtggcgtatgcctcgggggcgggagtgatatgcatgccaatcttggtgacgacacctgtttttgttagtgattgagttgttgaggagatgggagaacgttaagtcttaccgaggttggattggtagaacagaccgtcaagggttgggccaaagcctctgttggatggtaagtcaatatgttattggggtgagagcataggcgagccaatgaactgtgaacataccccttgtatagcgcgaacgttttattatccttcatcgctcccatacccgtccgaagcaattcaccattaggcagcacaacttccatgccgcactgtgactgcgaatgctctccattgggcgtatatccaaagcctcggtccatggtatttcccaaaacagaaccccatccaatggccggcaccgatggccagaggttcaggccctgtcgttggatttcctcgtaaaggtcgaagaaggatacacccggctcgactatcgcgtatccgtactcttcgtttacctcgacgatcgtgttcattcggtgcagatctaggataacgcatcctttgacgacagagctggatccaccatatctatgaccgttagtgatatgcagatggcataggagcgatatacatcatggacgacataccccaggttctttccccgtgacactgtccacaaacacaccttgtgcttatttgcaagcttcacgacctcctggacctcttccacagtactgggtcgagcggcaccgcttggtgtgtggtttcctgaggctgaaaatggatcgccgtaagacttctggccttgagtaccctcgagtgcgccatgactaggggtgcgggaaatgttgtcttctccgagcacacgggcgacgtcgtcaaagaaattgcccaatgcctgggggttgacagttggagatctatggggtgccattgtgtcgctgtctgcaagtggaggactacgatatgtctacagggatctacggaaatacttattatatgcacatccctttatttctggggtcatgatcaacaacagctcctactaatttaccagcagccggggataccgggggaagctcacccgcggtcaatcccccaacaaaccggccgctggtatggacccatgctcgccccgctttgatgtcgaaagtttacccctctcggcgtggtcagatttttcagtattatccaccgacagtctctcaattggttctttcggcagtagtgcgtagggatatcctgtaatttgaaacaaagctggagtattgattgaagaactatttgggagactgctgttgagaggttctatatgcctgaggctagtattggcatgtgacagctcgaggattcccaattgacccgtttaccagatggggtagacgctgaaccagccctgtccttggtatttcaccatctctaagactgacagtttccacatcagaggttacgttggacttttctgactcagtgggaaacgggacctcgggattgagaatcccccgagtttttagggaaaaggccgggaagcaatccctgggtatccgcgtatccgcggccttcgtccgcggatagctggctgaacagccgcttacacatactacggaggattttgtttgtattttgcttcgttctatgagttgataattagacctgagttaatagttagaccccttgttccggtaattactagcgccttgtagagtgactatattagatcggatatccatcaatatacatagaacttgtgtcactatttcttccgtgttttctatgattccccaatcttaccatgtttgtcattgcatacaacatcctctttctcttgattgcgtggattctggggcaatgcatctacaatatctttctccatcctctgcgccacatcccaggcccgcttctcgctaaggtgtctcgctgttggctctttagcttagagattagagggactcagcacttgaaaattcatagcctgcatcgcaaatacggtatgttaaatttgtgtctaccaaatgaatatcgccaacttacttcagaggatcaggaccaataatgaggatatcgccgaatgaagtctcatttgacgacatcgaagcgtcggacatcatttacgcacaaacttccaagttcgaaaagtctgaatattactatcgtgcttttgaggaccaaggccccaatctcttcagcatccgtgatcgtcaacatcattcccaggccaagagactcgtgtcccacgcgttctcccgtgcaaatgtcattcagcacgagtcgtctatatatgataaggccctctacttaatggataggattgagcagcgagcaaaggaacgtcgaacgatccctctgttccccgcattccgttgcatgacgcttgatacaatctctgaattttgctttgggaagtccacgggcgcgctgcatatgaacaacttcgagtcaacgacctttgaggccattgacaaggcaaatggggcggtcctttttgtgagttctgccttcccgtcacgaagcctcaagggcagggtgagggatagaattttgagactgacatttttcagttccaatatttcccattcctccggcatctcatccagtgggcaaacaactacaaaatatgtgccgtccctaatggatttattgagttggcgcagaaagcggaggctggcttgcaagacgtgcattcttctggctcatggaccatgttcaaaaatatgatttccatggcggagaagaagtctacccaactgacgaaggaacagttggtgtctgagggtatgctcatgattgttgcaggcacagataccacagccacatccttgtctgtgacccttcacaatttgctgcaacagcctgagacatataagaaattgcaagatgagatccgcacagccatgcccactatggattccagaccgacaatacaggttctcgatacactgcctttccttgatgcgtgcgtcaaggaagggttgcggctcgcttgtcctagtcacactcgccttccacgcactgtcccatcagatggctggtatttcaagaaacattacttcccatatggagtaagctctaattcaactatttacgtccactggaagccactgaccttctgtagaccaatgtgagcacatctcccctgtattatctgcacagcgacaatgtgtttcactcccccaagaaatacaacccgtttcgatggttggtcgatgacgaaaagaggcgacatctgctggcaaactttcatccattctcacggggaactcgacaatgcattggacaaaagtaagtcttccatcgcataccatctcaaatcttcacattgctgaacaaataatctatagtctgtcaagcattgaacagaaaatcgtcctatcgctatttattagacgtttcaaccccggaacagtcttaaagaagaaagtcagcctgatagaggcggtgaccgcagttcctgacgatcctttggaagttcttgtgaatcttatctttgagtgatcgtacctcttctctcgcatatattgatgtttctactgctggtggcctgtatgtacttggaatgagaacttaggctttgaaggccgaagatatttgatggaagtgatctcaaacaggcaaaagtcgtaaaatggaatatacatgctttggagcgaagaagtccctacgtagtgcatatcgccctaaattccatagtcgctatctctccataaccgctaagaaccagagccccactctgctaattggaagtatgtacccggcttctcggaagccgcggaagggcctgaagtggaaacttagactatttaccttttggtcaagatatcccggggaagcctcgggatccccatactgctaagcggaagtcctgctcgagggaataaattacactgtggaggctagggatgattcggtgtcccagtcatctacaactgacacctcgggcatacgttacctgtcggagtcaggggtttaacaacctcttccgatgcgacatattctcagctagattgacaaagtggtgaattgttaacttctcccatgcttcctgtgcatctacgaactctccccatgtatcctcattattacgcatatcgcggagccagggccgtagctttaatatatcggcctttaacaacgagaggttctcaattaggtttaaatcaggtgaatagggaggccaatctattacatttagattcatctcacgtagaaggccctgaataatatacgcggtgtgcgtaggtgcgttatcatactgaaaaataactgggcacggaagcgtcggcttgatatatggtatgtacatgatagacataatgcgaaattatgaaggaatcccccacagatttctgcttccccgcacgcattgtacttggctctatgtggggaattgagctccagtcgggttattgcgaatcattccgacgtattcccgggttcgagtatataagaatatcgagtagctcacatacgttgatccaatttacgaatgctttttatctaagatgtcaacagtggttgaaattctgggaaatatctcctctgcggattggctatctgcatctctcgcatgtgtgagacttaagacatgattatttcttatcctttataatgcttacttttcatctctcacagattttgctacatatcatctataatgtgtggtttggcccattagcacatattccaggcccttttctcgcgaaagtgtcctcattatggattgttttccaatgtcgttacacaagacgatccgaaactcttctcaaacagcaccaaaagtatgggaattttgtccgggtagcaccgaatcatatttctatatccgatccgtccgccttagaagcaatctacgggcacaaatctgggttcaacaaaggccccttttatgaagataagtccagtaagactcaatttcaccatcccaactaacatttacagactattttaccctttcaccaagttgagcctgtacttttcaataccagggatgtgcagatacatcatcgaaagcgcaaatatttgagcccggcattctcggcaaagaatttgaacgaatacgagccttatatggcgatgcaaatacggaaactgatggaatgcttccaccgtcgcattgaaaactctggaacggtccaactggatttcaatgagtactgtgagtggcccaaagctgtttagatcaattatggaagactaatttctacgagcaaactacttggcattcgacgtgataggttaggccccccacaggtccattatcattattatttcgctgacgggacgtgtgcaggggattatgcatttggaaagccgttcgggtttcttgataaagagcgagatcacctcaacctgatagccattattgatgcacgcggcgaggttctcaacgcattgggtcatctcccacaaatcctccgaccgatcatgaaatattttttcctggatccattctggccaaatgggctacgcgcgacgtccaacttggcagcaatcggtacacaggcctattatggacggaaggatcagaaaaattctcggcatgacctccttagcttcttatttaaagcaaaagacccagagtctgggggtccattatccgagaaggagatcattgccgagtctatctcatttattgttggcggtagtgatactacaagctcgaccatgactaatgtggttgatattgtttctcggtccccggaagtacaaagacaattacaatcagagctggatcaggcatttcctggagtgatggaaagtgactgggtggccgattttcagactgcgaacaggctccctgtgttgaatgctgtgctgcgggaaacgatgcgattcaaaccaaccagtgccacgggactagagcgggtgacacctgccggaggcaagattattgccggcatgtttatcccagaaggggtgagtttggtttacctacacctactttctattgccacaatattggagaagctaaccagtaacgcagactttggtgagtgtgccgacgttgaatgttcatcataacccagctgtctttgtggtaagtgatcccatatcttctgaaagcaaaacctgaccggagattaagcgccccgacgaatatgacatatcacggtggctgggcagcgactcttcggcgttgcttgactccttctatccgttttctcttggaccacgagcctgtattggaagaaagtaggttataattccgtgttttgtttgtagccaaccagaggccccagcactaactttctgaaagcttcgcatggatggagatgctgaagaccttggccacagttttcaaattattcattgttgaaagaaccagaacgcttggcacggaagttcgcgagggtttctttgtcaagaacagtgaatgtaatgtggtggtcaagccgaggtttggacggaaagatagaacatgaggctacatctagagagttgtgaaaaacagatcagattgaataaacgagctgagcggaagtgcaagatggtattacggacatgctagtcaccaaaatattagttgtgtggacagcaactatgatgggccccagttgatgggcccagcttctcatgtgcaatacctaatacccagattaggcctcgccaaaacccgcccaaaaccccaacccgcctgttggttgataagtgatgcttcggtgttcatattattgataaacacccccccccccccccccccccccccccccccgccccccgcggggggatctgctattataccgcgttgatttgttatattggaatctagatgtgactagcactactccgtatcccgtatccatttccctccgtattccgtcctcccggacaatgtagctcttctccagactttcatctccgcatcttgtcgatgtctatcaaaaccgctcccgccacccgaaccagtcagatttccgtgtactgactggcgatagccctaactagcgcccaatcagcggtcaggccttgtaacgaaactctatgaaatgcaataatctgagcaatcgttcttctcccgttggaccgataagatatatagaggcaccgattacaggggtgatgttgtggaaaagccgaatctagcgcatggcatttccaagatatggtgttcttatcctacggcgttctctccgaagaaccatcccacgtcttatccgggtcttcaaccccctcagatacacatcctgccctccaatgtaaacgtttccagatccatgcgcaacagatagtcggtgatacgttggtcatgattcttagcaaccgacgccagggcccttggaccgagcgcatatcagctgcgagtcccgcaaatacatggggcaagtatacacaccgtggactcaaaaaaaagcaacgtgaattctagatggactcctttctcttcaaagtggaatatattatctgtattttgcaatttttatcacgcgcgcgctgcgagaatggctatcgaaatattgtagtatacggctaagtactccacggttcctgatctcccctcggagctatcaccaaatgacgatcgcgcgattcgttatcgcggccatgtcagatgactggcccgtacagatatactcaagtaaagttgtaacttttatacgcgctcttcgtcggcctttgcatatctcgttcctgcaggacgtacccgctcagtaccatctggactttatcacgcgagtcggaccggtatagagtacatccactatacctctgtaatacaagactaaccccatcgactggagaagccagccacgccgcaacttgggatcgatcaagtcatagtcgggccagtggggtggaccgtggcgaaaggttctcgaaaccccccggcgtgaccaataagaccctttctgctagggccaccccgacaccggccatggataagagaatcaaggcagtattacaggtcaacagggcatttcggttattcatatgtgtgattacaattatgtactgtaagagtcacgagtccgagggtgatttttgggttgtggtctcttaggtaaacgcactgaagtttatattccaatatggatacacaaagggtatgcaactcgggggatttaggtcagggattctccaatgatttcaggccaaaagtcatatgacacctggcactattattttctgccagccaaatctgtatatttgaattttgatttacagaatacacaatgctgcacttaatgcttgtattgaaacaggtggctacggaggatgttgtatacagcgaaaggtcgacaggcgcgaaacaagaaatatcccgacagcatagcctctctcattcgcgcctcctcggttttacagaccgagagctggccttgtggcgtaatttggttgaatagtggacttgaagggatgacatatttcggcctgggtagtgagccgtaatctcagaccatgacattgcctctttttccttcagccgcaccagtagcgcattctcgtatgacgtgtacggtcttagtttccctggaataaccgccgtgtggggtcgagacagcatcgggctagggtcgggtacgaaagtaaagaaatatgccgatttcagaccagaatgagattcgaccgtgaggagagcactcccgcgtacatcctggaaagcaccagagtgatgagatgaaacgggatcggaagagtccgaagggtcggaaagtggcctggttgaaggtctccgtttcttcctcttttgacatagctgttctttattataggtggtgttcccatcttggtggttgctggtgcctcgacctaagcggagtcgcttcttgtatactgccgtagcggcccttttgcttcttctggcggctccttgcttccggaacggtgatggtacaaccacggctatcgacggatagcgcaccgggacattggaactcagtgtcgttcaaacacgagaacatcctggaggagagcgcacggtcggcgatgcggacaggccagatgtggctgaggtgtcttcagcagtgctggaatcttcagcccaccccggagcctcgtttgccctagagcatgggttttcacctaggtaagatgtctgactcggctccgtataatttttgtagcccccagggtatagactgtatgagggctccgtgtagataacttccgcttggctgattcttgttgggaatcacccgccacagataggttgctagaggcacagttcgcttgttcgggtgcaggcatgggtgcggtcacacaaggtacgcacgagagttgagaagtctccatttctttggtatcatgaacagtgtctaaaaaaagcggaaaaaaagtcagacaatgagaggatgatggcttacttcattatcatgtgttttgccaacatacccggtaaatcatctccccgcatatcagaaggaatggggtctagatgacctggcactgcaggagatgggattgttctcgcggagtctgtcaatggcactggctctgagaaagccagcgcggaaattccacgatctaacgaaatatcacgggtagctggcatatttgttgtcactccgggttcgacatctttcgtcatttcaggccgagtaggaccatagacatgattgatctcgaagtcaaatatgttccagtcatgagttgtaccggccggtggcgttgactgtcctagtgatacctcgcacggtcctggacggaagccgaacccagtgggaaaagactgctggaagtatcgtggcacatgagctggagcggggggcacgctttttgcactagtgcaaggcggcgggcgacttgggccatggtagaagtcgatttgatcaaggtccaccctcatttcccagaaagtggtaagacatagcggaggtagataccgacagataataaagcaataacctcgaataagagtgcagcggtaactgggctggtgtatccacgtccgctctgaatcatatccaaaaaatgaaaaggaggtcagtcagcctttttaatacccgggcgccgccagagcattactagctgggaatcatgcagtatatcgccttgcagaccccacacaaccgagaaccgcgacaacactgccttgttgatactactccctgcttgcgtcgggcgattacttgagagtactccgggcgaatttagccaacctgcctcgtcgaagggcgtgttgggtccgtagtacccaccgtgtggcgttgcagccttcaagacacctcagctgacaactgatggattgggaagagattggcaagaaaaaattcctcaatcccagcggcagcctacacttcgccgatcacgcaagccgatcatgcaagccatcaatttcatggatggttgtgatgcctcagctcagcgccagagctccttgaggcatttttgcggttggctagtgagcgaaagcgggtctaatgagcgactcaccgatgatcctcaaccggaagtcggctgaaagagcaaaggtgaccgtttggtggcgcgcggcgtggcattcgcgaaccgaagcctgagacaaagagcggccagtagtcctcgtacattgctcttcacatgtccatttatcaggcagcccgagggtgagatgcacaccggttaagacagcgaccctccgtagcgtacagtataaaacgaggagtgtatagagccatatagaactgggaaatcaagggcgaccccggtgacttgcagggtcagaccgacgactccttcaaatttccgcgagtggggaagcaggctgtgctcggggcgcagagtttttagctggcaggggccacgtcagtagaccagaaaatggcgccggcgaaacataatggagggggaaaggggagaatcggcgtaggaaagaagagagctgtcgttgagcgacgcaccgcgggttatatagatggcggacgtcgcgagacgggcggtgcgagacggcagaacccgaccggggctagggtgaggcgccaaacccgttacggacgggctaaaccataaatggacggacgcgatactggatcgggcgtgggtcccacgggcgctaaaccccaaggaggggggcgccgaaacgggcggcgggccagcaaatcgcaattctactcaataacaaacccgagcgtccttcaccgccaagcgcatcacgtgaccgtgactccagatctactcccagggagtatacccgggggtcaccagcgactccaagcagtgactccagggagtcactcaagggagtaggaacgaaagatatataaggacactccctcatgtacttagtttagttcttcgtcttcaatcacacattgttacttgtgtttaccttttggattactgtgactctttaacttgattataacttgacaacactcacgagcagaccaataccccggtatagatctactcggcgctctacctggcatcagttcctcgattgctcaacaggacttaggctacagtaaggccctgcgcggcaatagctcagttgcgaccgatcgttgacgttggatactagacctcgccaaaaacatttagagggcgagcatcgcccgccctccgcccgacccgcgagggcagagggcaggtaagagcccgccctcgcccggcccccc

SEQ ID NO: 68 - DNA, 60440 bp, Penicillium roqueforti
  misc_feature (49442)..(49753): n is a, c, g, or t
ggactccccaaacagctcgccagaccaggaaaagcaaggaaaacagcagcccaatgaattgccaatccataatgataaggaccataaactggaatcttcagatcatgtccctccattggtaagtaaaatccgtcagcttcgaattctttggctgaccatcgtagccctccccttcgcaacacgaagaagcaacaagacataccttggcgaccgagccgtttcaacccacgttgaaggtgctagcagacctcgaacgcaacgatcccaagtttgcctttccagctgctcgacttgttggactctaccgacgcctatgggagtcatgcgtttccaagcacatcgatgtccaaaagattgaccagagcaatgggatcttgaaggagggacggaaagctggagactgagcattttttattcctctcttatgaggacaaactaggggaatttataaccacatgctacagtaagttatcgaatgcgttgaatgtatcaacagcgtgcaccgttggcacccgtcaccaacacaacgaaagttcaccggcagtataagccttatctctccttagggaagacagaaatagatagcggaaaaacaagtgtcattattcccccccatagacgctctaccacatggacactttaccaaggctcaggctcatcgacagggtaggcttgaagatcgctcgctttaaaggctgaaacaacatcattacaaagagcctgaaccgctcgcttgcgctccgacaatactgaagcttgtatattgcagagctgtagaaggatatcgctatcgcttgctaacaagtcatttgacgcttgaagctgtcgctgctcctcctcgagtcgtattttctgggccgatttgacgacgtagcattcctataagtaaaagtacaagtcgagcaatttgagggctggtgtagcgagggagtcattgaggcttactacttttatgaactccgctataagggtacctcgtgttctcactggaacctattcagtattagtgggttttttttatttccttcctagagggggattgacctaccttaggtttaatagttgtgccgtttgaagcttattgtggttggttttccaacttgggtttatcttctggagcgtgagatactcggcactgtctcttggctggccgattaatgggggaaggcgaagtgggatggtccattttggtgaattggatcagaaattatgctcgaggggcatttatagctgataattcatgtgaggctactgttatttctactagtgcttccttacctagggtcgactgcaattttaaagctagtgaacagttagcttaaccgctgacgctcgatctcaccacctgctgagagcaaactgcttaggaataagcgggattaaatcgcatctatagtattgacacaaactaatacaaagtctatcttataatggtagtctataagtgtacttccgatgtatggatgctataaattactttcaaatcattgaagctttgctgtgactacaaactattcgaagtgcggaagtaaagataatttgattcccaatcttgatgttaataggcgctgggaacagctatctcgcaccacatcactagagctacctgaaatagatgtcgctagcccttacaaacgattaaatattctcctcggagaccgttttaacaattttttagtcgtgttgttgttataaattctgctctggatggccctctggatgcgatagtcctttactagatctagggatctcctcaaactgaagtgtatcagtctgggattggccacaagtgcatcaataatcgagaaatgtccacccctgaccgctaacatcaatggatcctcgaaccattgattccttaggttgatatcaattcggctatggcgtagtatttcccggactatctctaggtcaccgccacgggcagtaatgcagagagcagtgtcataggttgcgacagtgcttttattaacatttagacgtgcgccttgctgtactaagagccttaccacatcgagatgactatgtgaaaccgctcgataaatgggcggatctattaaaccccttctattgatctctacgccctctatactcagtaaacaagcaactgtcttcacgtgtccgtgatatacagcaacggaaattggagagtggcctgcaatgcagagattcagagcaatccctggcactgtaagcagccgttgtagaagtatagtatctaatcttattgcggtatggtgtaaagatgtagacggggactcaagtctcccacggcctctaacgaaattaatgtcgatgtctttctccgccaagagcctttcggttatctcgtcgtatgacgagtaagtagatagccaaagtggtgtattactatctttgtctttgcagttcacgttggcaagggggtggcccaggatcaaattgactatttctaagcgtttggtttgaacggcgagatggggtggcgtatagccattccggttctggatgttcgaattcaggcccttttgcctgagaagtcttttgacagcctctactgacctataggccactgcttggtgaataggtagctcagcctcttgtgatgatttggtactaagaaacactttggtcatcggatcgtttgaaaaaatcatttctatcacgggtctattgaaacgacatgcccaagaccacgccgactggcctgaatcatcttccaagttagggtcgctgctacttaaaagtagcagttgcacgaatcctattcttcctgcgaagactgctaggtgaagcgccgttcgcccgtatttgtgtttaatgtccacactggcggcgcggtgctctagcacgctcttgacgatggagaaacccccgtagtggatagcatatgacagggggctgtcgcgcgcttgattttggatgttgatatctagatctcgatggctgagcagcagttcacgcacagcagcggaagtgtatttcaacgcccgcatcaaaggagttttgcctcggtaaaatgcattgatgttggcgttatgccggagcaaagcctccccaagaccaacgttgtcgtatttgacggccaggtgcagcaggttgctgttctgaaatttgatattgtatctccagatgctgggctgcagtttaaaatcgaagtctttgcatgatttttcgagggtaaataatgcactgccgtccaaatgtgacacaatccacaacaaaagctcgttgggcagctctgtaaggttttgctgcaatgtattagctcatcggtaaaatcagcaagaaatcaaaacagaccatgaccggataggattggagctaggaagcaaatgaaatgtaaatgtggctgaggtctgaaagttggacgccttagatatctccctcagctaaattctgtggtcagctagaagtgtagcccgtcactccgctgaggcgcgtagcaaccacacggcagcatcaaagccttgacaagaatgtttgggcggcgttgaaggatctctggcgtctagctcccgggaacgccaaatcagttcctggttatgccgatagcctggagaccgaatctaccttggtacccacttctcacatctagcgccataagagtaaatcatagcacataacgcgcatcaaagttccataggcaacccagaatttcacccagcatttgtcgactttgcggctaaccgcagtagatagtctgttcgccaatacatggccatcgcgatggacagtcacaagtgcagctgattgcagcagtggtctggaatgatatcccttctcgcaggccactgattggccgtatagtggcgcatactgcgtgcgaatgcattctcggacgtaccgactgtttcaaggaagtgttccatgccagccacgtagccatataggtaaggagccacggcgatggcatataaagctggcgagggaacgctgcaagatagtccaacaccaattcccatccgaagcattttctgcctttgtccaccacctcaatgtccgccatgctgccttggaattcgcttcttgtttgtgagatggaagtcagccccaatggtggtcctggcttctgttgcaggatgacgaaaaaaaggggctccaaccaaaaactcggtcaaacgtgaagacaccaagataggccataaaaagctgaacactgtggccagagagctgtttgacctgtcaaacttgcaatcgaagctctgtgcttttgtcaaagaatctctctgtgcaaggtggcataggcaacgacaggccgatggggttggccagcagtggtatgaagcagctgtccgcaaccaggcgcgagtgtcacatgactctagagttgcatctccatccattgtgcatccgagccagcgtcagacatcgccagcctccaggcgacgccctgcatcagacaacactgaccggtcaccacctcacgggctcacacaagacccgccggggcccgtctcaaccagctccgagctggtgcaatcaatcaatcccgctgtcactgccgaaatgctgcggaccaacggtgttccatggcacgtttcgccagctcgaccagctatcctgacgtctgtcactaatatctgggcgggtgtccaagacttgacgctccagagtctcagcttgagtgaagagctcgaaaaagatccactgtgtgttttgtttggccgaggacgaggaacaagcaaacgaatgcgtgatcctgtgttgcgatcagtgccgagcgcatgcccatccatcctgcgtggaagagtggttggaaaagcgacgtacaagctttggcacgtcatgctgtgtgtggtaagtatagatggtttcaattccgtaatgctgggatgctgatgaatgctgtcgaaacgaaggaactctagacgcattgattcgtccactccgagtcctcttggcagataccgaaacaaactctgtccactcggcaagcgaatcatcaaccgatagcgagcctgtcagcgtcaggagtccagcacgaaacgacccgagtcagagtcaatcgcgtcgggggtcagtggaatccctaggggtatcaatcgagcagagtgggccccgtcgctcagccagactagcaggggctcacctaccgcgagattcttctacctctgcattgcttcgccggtcggcacgactgaattccaatcagcgtaggtgattacaatttacagcaaacgcgcgacggaaatgggaaattagcgaagcggctgtcaatcacacgtgactccatatcctggtgatatggagttttggagcaaccaaataaattaaatcctgatcgttagaccccatagagcactacgcgaccgtttcatgtttgcaagtgctagatgtcaatgcacctttaatgctattcgaagtttgcttcatttcagatacgttttagctcgaaaaccgagcgccggtagataaaagcgcacatacctaacggcggcggctaaagtaaatgccgacagcgagttcagctgagccttgtggagcgcgaagacggacgttgttggcagaaaacacagctcgcgcgtcggcaggagagcctcgacaattctatccatactgtctcgcgacgtattagaaccagctcatctatttaatcgacaaacattgttaatctgactttcggaatcaacagattgatcctggaaacgccaagagatattatagaagctgtttattccctggaaactcctctttagctcctggggtcacttcctgtttctaggaatttgaggtctacccctgggaatccacactacgatcctgactggttacaaactggctctgggaatacaatggctagatctggaagctgccgtgctcctggggccctacttttggatcctggactcattattctgctttctgaggtggcggaaagccctcacaagatacccttaccagacctgcgcacaaatatgagtcattcaacgactcctggaaaggcaagctatagccccaggaaccgcacctgaggttccaggagttgataagactgtctacaggaatgactttggttcctcgaggtggaggtacaagaccccagaagctattttgggcttcctgggggctacttggctcctggaagcggcttctttgcccccagaaaccacactgaagcccctgggagcaaggtagctcccagggcccagccatcatttccagggctgatagagcttgatcctggaaacctcaaaagcatttataggagctgtgtatcctaggaaactaatctactcctgggatcttcactctacgttgtgacggttcgtgggtgcttgggttttaccactacgccatctggccaaaaaggcacaatgtttggtcagcgaccaaacacccaagctactatatatgcttgatctctgacatacgttcctgaatgaacacgaaattggtttggggaacgcattgcctggatctgggcgcttttgcactccgagggccgtatctctgaatcctggagtcaatcttctgcctcccagagtacggtactaacttatctccagacctacgcacaaatctgagtcactttattattcccagatgtctagcctatggttttaggaaccggactcaaggctccaggaattaataagctatcaacagggatagcttattaattctccgaggtacaggtaaaagccccagaaactacgtcgggcttcccggggcctacgtggctcctagaagccgcttgtatgcccccataaaccgcactaaagtatccggcagcaagataactcctagggctaggatgtgagttcctatcactgatagagctgttcataggaacgtgactaaattgctaaaagtaaagatggatagttctataagttacgtacaatttcctctagctatgtgattcctggactactgacatgtcccagggtcagtttttgaagtctttacgaacaccaagattgatggatatttacacagaagatcgtcaaccatcacttatcctatatatcgagccactcagaacacggctccaatatcggccaatatcgaccggctagtccgatcaagcgatgaatatgctttgattccaatcaggaaatccaatatgtaaatcatctccgcaactctgcagtaaagcccctcctttaattgaacctatccgtcgcacctctctaatgtttatagactccacctccctcattcttcgaaaaccatcataaaattctgcgattgttcttattcgtaatacctgctgtctcgtttttcacagccctactctagtaggcagttggaaccgccactttgactgtgttataggctcagtacgcgttctctgctagtgaccaagtaagtcacgtacgacaaaacgcacaaagacacaatgaccactaaagatccgaaagcggcctggccaacagatccataatacataatattataatatggaatgtggtcctcgctgccaaaaaattcgaaggatatctgaaagccgtggacgcggctggcaatccaaccccctaaggagagcacgatcatgctcacgatgatttaaatgcaaccgtagtaaaaccgagcggcgcagttctcttatagccacttcgggtagatcacaaggattaacccgaagatagaaaacagggctgaaaccagggccgcaatcaccatgccgtcgacgacgttgtccataagattttggaatgtgatgtccaatatagagtcggtcggggtgacgaggtcggattttacacagtctcgcaggacgaccgcaaagtgtacaatggccgaactgagactagcaagggccagccaagtgatagtaagggaaataatgacaagacgcattcgtatcatggcggcggcagtcctcggagacattttgtgtccgcaagggcagatttagtaggcatgaaaaggtgaggcaggtgtcgctcaagggaacagttgagcaaagtaaagattaggacgcagaaggataaagcaggtcattatccccgggtactgtaaggttatatgtgctaggtaatcttcacgcaaatgctgcctctacaaagggatgacccagctgatactgagcggcgccgtataccatttaattaggtgtcttagtagcattccacggagcttttactagataagtatatttcaaattgaagcactattcctatgctcaaggccgatggcctctaaagaagtgtccggtctcttagtacggatccccggaaatcacccgtttgttcccaggatttactttcctgctactatattattatcctccttaatatgtgtcgtggttgcgcatatcacttctcaagtttggacgaacaccgacggaagatttctgataccgacgtagtttgccttggtctatttgcgatacattgtacttaaggaaactactgttgattgaaaacctacccaacagcccccagaaagatgtagtcaactcttttctatatcttttgttaagcttgcatttaacagccagtttctaagccatgacaaaaccgtcactgttaggtgaactaacgcggccgattaggaaacgagtttcaagtggcaaatttaacaaagtcccactattagcaaggaaaccaacatggctcagatggatatcttctataggcggaaaacaacatgctactggtgttcaatagtattttatgttcaacgttgatatcaacgttgattcaactttctgacaccattcactacccttatatcgcgaaaggtactggaataagaacactcaaaagatactatcatatcggcacaataccagcggattataatcaaagaacctatagcgttcagtgctcctggaagcacaaaacagacttttggccagtcggatccattatcgtggctgcgcagcgcggctgaatcatggccctctagcaacccccaaggcgtcagagatacaattcccttccacacattcctattcatggccaaatataacctatttaggaattgacaactctctccctcttcaattgcatcactatactgtagtcccatcagatggcaaagaagaaacaataatgtgggtgaatgatgctttcatggagatttactcgcatttatgactctaccgagcgacgccgtatttcgtgaacaaggggtcaccaagcagtcggtccaagcagctttcttccacaccgaccagaatctccatgccaccattcggcaaaactgggagcacaacttgacagccgttgatgcagccaacatggggcactcgtacagcctcaatattgttgcccagcagtggtccccattccaacctgtacagtttgaagttcacccatgaggttaacacgcagttgaagccggggacatctagaaaagcggttggtaccagccgatcgacgtcttcaagttgctctaccagagttatcacatcatccgtgaactgctcatcggcccgcagaattgccttgcggatttccgtcgccagatcggctaaagtcatggtgctgagcattttgcggatcggcaccgagacggacacatactctaggaaacaccctaaagtcgatggatgcaacttgggatctgtacgctgccgcccgtcaatagcaatattgaaaacagacacagggtcaccctccagagtgtctaggggcgactgtactgccatgactgtacgccagagtagcgccgcgagagcatcattggtcgatatccatttttgatcggtcggcttggtcgcattcgctggggacgcctctgccttcagctttgctaaagactccggggaaaaatagaaaatctgaccgcaatggctcagagaagacatctttggcgggggtcccgggggtgtaaaaggaagaagagtatactctggatgattttcgagctttccagcattatggccggtcggctttgtcacttgttcgcggtcttgccagatggcctctggaaggtggatgggatttaggatctctagtccctgtgcctggcgacactcttctgcccatatgtttgtccaagtataaaatgtggtaccgtcacccgccatgtggagtatgcaccacgtcaagatcaacccccctcggatgaaattggcctgtacaactgaaatcggcagtcgctccccagcggcaggccaaacagaacggggacagaacgtatcggcatcgaaggaggagacagggaaggatttatctttcaactccgcataatcagatcgaaaggactcacgtaggtccttgaccacaatgcgcgctacctcatggttctccagtttccgaaatctcatcacacccttttgtttcgaactgccatcgggaacggcttcgcacgcgacctctgggattcgttgtgtgagagcttggtacccggctttaagaactcgaatagcttcatccaagtcatactcctcctgaaggtgaaaggggaagatgtaacgaagatagcctttagggccgatacgttccaaaactgtgagctcaggaatcggttggttattcacagaacccatgttgtatttgggttagggtacccgggaaatgaaaagagaagtagtggtagacgggatgaaaagtacagagtatacgcactggaatacggggggtttatcattggcaaatttctaagtcacttggacatttgtacccttcgaattattttctactgcctaggctcagtggccattgtggtgagatagggatctcccgtttcaagacccattgaaggatgatgcttgactagggccatgcgagacgggacatcgcaatttcattaaattatagtgcgagtggcgacatatggattatacagggatatcaaaccgaggtattgattactaagatcacttacagcttaccattggtaaatcgctagataataccccgtatggagtagtgtgcaggctttggcctagccctaacggcccgaacaacgctgatactagctttcttttaggcgggatcggcgcttctccgacggcgatcgccctgaaattagcctgtataccaagaatgtctggtgcaacatctttatgtggttaaatgttcatctgcaaaagtacataattccaggagccatcagatttgattgctagagtgaatccatcattataggaactatctcattcgctccgcagattaatagctgatcctgctgtgtgcctcagttcgatgctgcgatatttctcccattaagtacgcatagtttgctatgaatgaggacccggccattgtcgctctctttgggccagccccgttgaatatcgacctcactgccagtgaggtatctgttaacaatggtgtggtcattgcaatgctgtgtctggctgctttgttggtgattctacgcttcactgctcgaattgtcctccaaaatgccttgatggcggatgactgggcaattattgcggcactagtgagttaatccttcgccagtttggatcacctttgttgactgtattggatcgaaggtttgtataggtgtctcagctggaataagtgtcgccggtgagtactaaacccccagcaaaagaccattgtttaacagagcaacgttgtacataggcggcactactggtgcaggaaaacatatatgggccgtcaagctggaagaattagtggacttgtacagagtaagaaaatgcccttcaaaagagcgcttgacttttctaacccagctttatttagcttttattctcttacacgttcatttatgcctcgtcctgtacttgcaccagactctccattcttttcttttatgcgcgaatctttttccctttggaatcctcgttgaaagcggctctcattgtcggattggtactcacactctcatatcctatcattatttgggtaactatgggcaatgcttgcaaaccagtgtcccacttttggacacaattcagcggcgctgaaggaaaatgcatcaatatcaaccaattctttctcgcactagggattctcaacatgctaaatgatctcattattctgatcatcccttttccgcgaatagctcggctacaaatgacccttcggaagaaattagcaatttgtggcatcatggccgtgggaatcttgtatggcctctttgcttttctttttaagcctcattccgtgaacagagctgaaccatttatcctagtgtttttgttgcgagcatcgtgcgaatccattatctctctgaattcatgggcgccgtggacgtgacatggctgatgggacccgtattcatctggtcaaccatcgagccatcggtcgcggtggtttgtgcctgtctgcctcaccttgcaccgcttgctcgactcgtccatcgatcaatcttatcaagtttgaattcacaaagatgcactattattccagaaagaccaggactccacagtggttcgggggagggtctccagagggggaatcaaaccagcaaccggggaccaacatttgactacgggttcgatcaaatgaagaggaacgcaaaagacgatgaaatgggactaactaactatatcaccgccggtcaaaatgaggccatgaatccttcgaatgactccatatccgaggatattggtcataatcactcaattgctgttcattcaagtcttgtgcaatcggcctcgctaaggccgccctggtagggtgatactatatggaatcaagtccctactgcattagacttggagaacacaataccattccatcacccgctttcataggaggagatgaatacctaacatcgagctaccggtttccttcatatcatgtacatatcgtcagaaaagaatataggcaatgttgtcttatttcaacacactttaatcactggaactcgcttgttggccgcaatcctaaaccattcttctcgtacgccatgccaattatcttcatctgattctatgaatccttacccgtaacccaatattgtgtagaacaccccttaacacgattgataaattcttcaagttggtaccgatatgacatcccccagtccttaccggggagattcgcaaattcaccccctgcctccttgtaactgtaagccttatgtgccttggactcggtctaagtcttgaccggtatgctatcactcttgttacgaataacgaaggtatccttgatatcgatacggtgctagatgaaagtatggataaaaccgtgtagcgttaccgcccgtgtgcgtagcttctcttgcgacttcggggtggacttgtcatcgacgacgacttacttgtgtgtgacgcgggcctcggacagtttctataggataggcccacgtatggtggtggaagcttcggcaatactgccattcgggaagcgaaatttggctttaaagttagtatcacactggttatggatgctgtcaccgaagatgccaggttcgcaggttagacactcctcgggttctatattaaagattatgctgataacgccgaaattgtatgtgcctattatcatcatgctcccgccggcgagtttgtagttgaacccgatgttgtccttttcgagcattaaccatggaaccataaagtctgtatggaagtggacgatatcagcgggggtgatgaaggaccggaacttgtgcactgtaggatggaacgggttgtggaaagcctcgagcaacacgggggacatttggccgttatagcttgggtaaattgaagagaatctcagcctcaatggctttggagagacggcttttctaaaaggacatgcttgacggcacgaatggtgcgtatggcctattcgaagtgtaaactgttgggtaaaggaatcaagactgcatcgatcttcgggtcgtccaggatttctgtttatagtgagacggggctctctagtaagcctctaagtctaacgcaccctcgtaggatgtgcgaacgccggggatgttctgcttttagagaatgccgaagcacaggcatgatctctagccgcaatcgcttgcacgataacctcggaatgtgagagggctggtgtgatcaaggcgagaggtctatcagaaatcaggttcagcgaggcgaccacttcggggcatatggaactcacgcaatctgggccgcccccaggatgccaaaacggatagcatcgttcttcttctcgacctttggagggccgaatgccgtgaaaactcgcataatcattgctgccattgtatttaatttcccttgcttggaatttcccagagacaaacaatacaatttaatcccaaagtgggaatggtagttgtaccgtcggggtgaagattggaccgactaacagggtataggaaaggggacgacagggcatagagtggctaatacgtctcgatagttgggttcatcacaacctatcgctcgaaacatgcggaccattgaatttgccatagacggcgctattgacggcggtatcgcacgacaatataaagaaaaataaacctcctcacagcgccgagatcatgtggtggggattggataaaataccacgaatagatacacttggaatcataacggattactatcgatgtatgcttccagcccacgaggctggatggacctgaccgtcaattagatcgcacaggcttaactaaaatcacacagagcccgatgacgtttgttcatctggaattagtggatctgacggcagctcaggttctttgtttggagacagcttcctcgttacagacgagcctacacttctatcgctgacttttaacagatatgtttcttatgtctacgagctgaacaatctgactaaagaaaggcttccgaggtaagtaattgtttgttgaaacttagagcacaatcccactaactatccatgatcctccctgagtgccgaaacataaagccccaagttgtgcgataaataatctttcggccgatagtacatatggagactcatcgacacaacgagataggcagtgatttgcaaaatagaaatagatggttaatctcaaccgtagctgtctgctatgatttaatcgcctattgtctcggccgggtcacgcttctttctcgaacatcaatagaaagtaccttgaatcattgtgcttcatgtccagctttaatggggctaatacagtgcgtctggtttcttttgaattagttaagctctattctatttagtaattccctattccgtatttcataaaataacggaaaatcaagccaaacaaaataatttcctccaccaaagaatgaaaatatcgcgccccctttggagttcatcctgttcacaaccaagagacatggccacggattccgaaactagaaacggtcgacgtaggtgatagaaggtcattcggcaaagagggcagctggcgtcatgtgtacatatccacttgtcgatgcaaggtttgtgaaataggtgctggcatggcaattggcgaaagatcgatcgagagctcatatccccgagacaaatggtacatatttggatggtgacagcctgtcgagtattagccctggaaatgactggcttaggcctcatggtgagttacaattccggttgagcccatgtagcaaggcatgttggctagttcgatatccatcgcccggagtggccctttcttagtccgtgaagggacgaacatatacgaatcgaccatgatatacaatttcaccgtgaagaagttccgtcattgaacgggaatagcacaggaaatagaagggatattcgcactatgtccaatgctacgtttgtcaattatatctacccatcactatatacgagatcaaactagttaggacgtggttctttcgaagaaaatatgaatcaaggagttacttccatcatttatcagaattattacgtaagttctccgtattctttcccggctttcccgctttcccggcttcgaatttctcgcttgcttccacttctgctcttgacaacgtagggataagtgggagtaggcttaggaccagtttctcctcacgcggggtgaggagaaagaaagtacgtattgatctgaattgcaacatgaatggcctgattgagaccatcaagacatccgacccggtcaaaccttccccggacctccgacttgacgtacaagggttgatgtctatatctctcgcccgagatagcccaccaaatgaagacggtgatgtcagaccgttatcatcattgaaataactctctctagggatggcttgtcagtagtataagtacctgcttgtctgcctcagaaaactctttcactgcgagaatcaaattcaatatcacctatatcaatatatttttcaactttgccttacagacatccagcaatcggctcacaatgtcggaccccaacaatcctaatatcaagattagatccactccacaatggtctctctacagacgggatgcattctggaataccaacaatggcgtctatccgcttttcaacacggacccagctgaggtcgagaagctcgcgaaggagaaattgtcccaaggcggatggtaagtttagtcatccgaagcataacatctcatcaacttatccatctaggtactattcgtcatgtaatgcgggcatgtcttggacccatctggctaaccgccaggcattctaccgccaccgcattattccgcgcactctagtggacacgaacactagagataccgtgactgagatcttcggtcatcgagtctcggctcccatcggcttcgcccccattggtatcaatcgcatttatcatgctaccggcgagctttcggttgccaaagttgccgaggaattgaacttggcgtactgcctttcctctgctggtagctacagcatcgaagatgttggaaaggccaacggcaacggtccgcgtttcttccagctgtaccagagccacgacgatgagcaggccatttctatgatgcagcgcgcctgggactcgggctatgatgcatgcatgctcaccaccgacacctggtctcttggatggcgccacaatgatgtcttcaccggcaactacgcattctaccacgatcacggtgtaggtgatattggcctgcaggaccctgtgttccagcagcgcttgaaagaggcaggaatcgaccctaagaaaaatcccaaggaggccggtgccaaatggatcgacgagaatatttggcatggccgggcccatacctgggagaaggtcaagtggaccatggcccaatggaagcggataagcggcggtagacctttctgtttgaagggaattcaaagcgtcgaggctgctgagaaatgtgttgaaatgtatgtcgaggagaatttgcgagttcatccatgaaaaatgctaaccccagcgatagtggcattgacggcattgttgtgacgaaccatgccggtcgccaggtggatggtgccatcgctagccttgatgctctggaaaagattgtcgatgccgtcggtgataggctatacgtaagtgagaacatgttatcagatccccccgagaaagacgtatcgtgaacgcataaggcggaagggaagataacaaagacttgggggatcggagaatactgaaaccatgctaatgtatcgacgttcgacagatcatgttcgactctggcgtgcgcagcgctgcggatgctttcaaggctcttgctctgggggctaagtttgtcttcctaggtcgattgtgggtttggggtttgagtattgctggcgaggctggcgtgcgacatgtgatgaaaagtttcttggctgaatttgatattctgatggaggaggctggattccaatctattgaacagattgataggtcggctatcgacagccttcccaacacttcaaatttgatctctgaacacagtcggatttgagttccatcagggtttgggaagacaacatggagctagttgtcgtcgtgaaaagaaggcgaattagaaaacccccttgaaattgtttgactgttggggaatctggaatccgaaattattgaagtcgattcttcttatgaattctggaatgtgtgtctgccttatgtcgcgaacgtattgaatattgagtatttgatttgagcaggcaatgaacatgattttacataacccaagtagtatttaacacggcaatgcaatgcgctccgaaggataccaagcacaccgagctcgactcaaaaatggtggaggccctggctgtagtaggatctggagacttgccaggggtgctttccaatattaggggtcagcgcctcattctaatataacaagattagatttcgtaatggtaataggaaaaaggaagctgagagggtagctctgaagtggttgtgaacgagggcgatcaagaatattacgtaaggtagacgacagcaggattttagcggtgaatggtttctgccaggacgaggttgcgaccgactttccgttgagaagtcaaatcccaccgagaaaaaaaaaggtattcattcattctaaagacttttcaatctttgcctcttccaaaatttccgagtggttcaggttatgagtggtgcccgcactcagaatcgcatcacgcacccactgccccctcggacgcatcactgacctaaacggcttgggcaaagtgacaaaaccctccgtgcagtccatatcatggaccttgtgtctcgcgcctgtgctctcgtccacaacgccagcctcaacatcaaatgaccacagcatgcgcgccatttggatgaatagctggttgcgcgcgatgagacggcccgtacagattctgcgcccgaacccgaaacccgtatgcggtagatccttgagggctgatgtgttgaagccgcagatgtcgctatgctcattagcggattcttcggcgagccaccgctccgggatgaagttgtcaacgtccccgccgaagacggcctcatcgcgagtgatggcgaatgcgttagggaggacagttgagttggcggggatatggtagcccatgtactcgtcctcggtcttggtgaagtgtggcacaccttggacgacgacggggcgccagcggagggtctcgctcgctgtgtcatgtcatgtgagaccttgcccattgtttgaataagaacaagagaaactcaccaatagcgtcgatgtaggccagcttcgggcggtcttcaaagttgggtaggcgatccttaccgacgacctcgtctagcagctgttgcgcctttttcacccagccacgcgaccccgacgtaatccaagcaacgataaaccagtccagcgcaacagtcgaagtatccaaaccagcatcggcaagaatgcctagatcaaacgcgagctcaacctccggcattcccgcagcctccgacgaagccttcatatgcttcgcaaagttccacttgccgctactcagccccttcctcaagttcccaacatgcagctgacgctctagctcgaacagctcctcgccctccttcttccacggcgccagaaacttgggcaggtgattcagcgatgggaacgagtcgacaatgtatgcgcccacctgcccggtgcgcgcaaactccgcctgcacgcgcttcccgtccatcagctccttctcgtatcccgtttgcagccggtagccgtagttcagacagtagatggtactggccattgcacgctcgaagtggtggtggaagtctacgcctttctcgccgaacttgtcccactcgcctagcacgtcccatagcagttgctgcgactcgaggtcctgtagcgggcggtagttgctcgcagcgcgcagggttaggagcggggcctccatcttctgatgtagtctgtactggccgttgtatggtcggaggagcatgtgcatgcccttagtgacaagctcgccggccatgaccaagcgtggacggtccgagtatcgtgagctgcggcggttgaggagatcgtgtgcggcctggtgagtcgacaggatgatgagaggctgcccagccatgctaaggtgcatgatcgggccatacttcttgctccagtgatagagctccagccactggaggctcttgggcagctggtgaatatttccgattagaggtacgggcttgggtcctggcggtaagggcagcgaggggcgtttgaagagtgagaggacaaggcgggcgattacaatcgcgccgagagcgccgagtagataggttgcaaagccgggcattttgctatacctgcacagacgaggcagataagtgtaactgtgactgcagctggaactgggttggcgagcagaccaagcaggccaatttaagtaccgtgtccctccctctccgtcgggttggcatcgaaagatgtgtggagtggtactattgtgcagaggccaatgagtgctcgcagctatttaatccagatgctcattgggctcattggggctccttcgacagcagcaccatactgtcctggtaaagtggaggatacgggcccgtctaggcttggagaagtaagccatatctactgatgggagtcgtgccgagtcgtgccgagtagtgcagatcgcgtggtcagacctcttacgtggatcgtctagtgtttgcaatctttcccggccacgctaatatataatatataattgctacgcttcgctccgcaactaacgtgtgggagtggggggcacggctcggggcacggccgggattgctgttggatccgaagggacacggcccgaaatcgagccgagcgttagcaagtgggccagacatcgcggttatttttgttctagtctatgttggaagcttgggattttaatattgactccaggctgcttaccttcgtcaggaatcctggacgattccgaccctaccctggacatctgtcaagtgccaacactcatcgcactatttgtattggctacagcagtggataaggtacttttgattgggaatagtctgtttacatccctgttagcgcagaggctgggatactccaaggtttgctaggctaacggtctcctccggaagctcgagtctagtcttcctattcgctgatatgggggggatcgctaagccccttaatagaaccaatttcccatctcttcccggagagtgtaagaaaaagtacgtttgggggccgttggatgccatttgtgagagcctgtacagagtattccaatttgacccatccatcagggtatggctagaataggggcgcccacagcaaaaaaaagtaaagaaaaaaatagattaaactagtaatgcctggttgtccaaaaaaatataaaacgaatatagtgattaagaccaagttctaacgtgaagctgccgtcgaggtgccccccaacgtgccgatttacaggtcccgattcgaatcattcttattctttctgctttcgccgtgtctctgtgtctttgtgtgtgtattcattacagagcttctagtcgagtgacgaaggagtcctaatgcggttagcaacgcggctagcatttgccatcgcagcctttacggctattgctgcgacccagaacattccgcaatgtgcagtatgagatctctccaatgatgaaaccgagtcacggctgataatgaccgctaggccgactgtctggccgcgggtctcaagaattcgacatgtaccgcgacagacgtcgactgcatatgcgccgacaagacactgatggccaatgtcgaggcttgctcactgggagcctgcaccgtcattgaaggacttggtatgccctggaattctactccttgtaatactgattgactaggctgactccatatccccagagtcccaaaatgccacggctacgctctgccactggccggtccgggacaagagtcttatcgctcccatcgcgacagccgttaccggtaccttggctctcgcttttatcagcatcagagtggttgactgtgctgctaagaaggagttcaagtgggctgacctgtgcgcggtccttgcatttgtgagtgtgccacggtgtgatcatggaagttaggagtctggcagctaaccagcagattagatcttttcgttacctatggacatatttgaattcttcagtgtgtttgtcctcgttaacttgagttataggtttgtgctaacagcaaagcagtgatgggttcagggatgggaaaggacgtttggaccttgacggaaaaacaaatcacgaacacagcgaaggcaagtatcattaggcaaaaaatgagttccagactggagaactaacagcgtggatagtatacctgggtaacccaagtatcgtatatccctgcaattatcctgaccaaggtgaccatcgtctgctttttcctacatatcttcccgggccccagattccgactgctatgccaggggactatcgtccactgctttctgttcatgatttcgacttttatcactgaaattcttacttgcattccggtcgaagaggcctggtcaggctggaagggcgaaagtacagccctatgctataatagcaactccttctggtgggcgcattcggtacgtcgacttttatcacttgattgattggattgagataccaactgactgaccctaggcaatcaacatcgctaccgatctatggatcatcggcctgcccattccaatgctcttcggactccagctcaagacgagtaagaagatctacctggttctgatgttcagcatcggtatcgtgtaagtagaacccaaccgtcaactcctgcgactcacttctcacaacttgatagaatcacggtaattagtattgtcaggttctcaggtctgctaaagtactctacgacatcaaacttaacatgtaaggccgacgcctttcctgctcagtgtgtttacttctatttcgtgcccaagctaaccaacgtgcacaagacaacaacgtcatggtagcaacatacagtgtcatcgagtgtaacgtttcgattatgtgctgctgcatgcctaccctactttccacccttcgccgagtcttccccacgatattcggtagtaccaatcgctcttacaattacaactacaattacaacaatactccctttttggacaccaatgggatccaaaagtctgttacacataaggtgacatacacgactcccgatgggcttgaggatgatgtagtcgagttggtggatagaggcgaggattacccacggaggaaatagtcaggtgggcgagaatgatccacattaatacagactttgtatgcaagtgtaaataagtgagagatttcctatttgttgcaggttgggtagatcgtctacaccgatatcggtcttgtgcactacatacattctgcgccctcgaacaaccacagagggcgtttcttagcaagcatttcccacttactatgtaaattattatggtattgctagaaataaccttggccacacttagccataggctaataaaccttacaagatcgattgtgataccgctgctagatttcacaaggctactcccataaccactataatatataacgtccttgatcctcaccatttttttcattcaaaatatagaattactattggtacggacgtatacacgtgagtggccagcttgtatgcaagggaaattagcatgaagcaaatgcaagaaagagattcttgagactataatttgcagctcctaaaccaaatatgtctcagagctggtcacctgcaaatttctgcatttttcgtctttttgattacgatccaacggaatcgattgaggtgcatgtctgagaggcgaggtatcgtccctgtaattcggagattgtctaaaaagaatggaagaaatgttcctcgggagtgaaggtatagcaggcatgcaggcgcagataataggaacgtcgcactctaaaacactccaatatattgctagagtgttggcatctgtaaatcaaaagatttagcactttcgagagacttttagcaggaaaagactgacatgtagtgttgggagatttcgaaaacttgacgagcgaccgcaaccgtagacaactgactacagtgattctaagatctcgttagcactacgagcagggcttttggctgtgtgtagaagcggccaaattggaagaccaattattgcgagatccatcgcgatttgcaccgctgccttgtaccatgaatatgcgttgatgttggtacacgttccttggtactccccagtccaaccggaccagaagtatgggataggtaggcactggaatgtcatgacaagtgttggagaaaccgaagcaagctgacaaccccatcaatacgtatgcaatcagctggaactgttctgaaggaaatatgcgtagatagaggggcaagaaaaataaatgtctcagggcttcggctgccatgtaacagatctccgctagcataatctgcttaatgggtccatggctgaacagggcgggatcaagcggatcaaagacatccgtcccggctccaacttcactgcttccaggccaatcatcgctaagacgatgttttgcgaccacatgattggtgacagggccggtccgattcatgtgggtatgagggtgaccccagcctccacacagcccgaagtcacagatacaaaagcgacttggcgtgttttgactggacatgtccatgcaaaagtggatatcgccggcacttgtctagaaacagtgcgcactaaagcaaaagcacgaagccaagacccccgcttcctgttaatgactaataaagaatgcatgaggtaagagcgggctgtcgccttgatatcttggaatcatttgcatttcctgtgcagtgccaaaagcacgcgtcaatgatgatcgccagccctctaaacgtgatcctcagcgtgggaatcggggcaatggtgctgtatgccatggtcctgcttgctcgcagaagggttcatgggccactaccccctggcccgccgggaaaaccaattctgggtaatatttatgatctgccgcctccaggggcgcaagattggatgcattggttgaaattcaaagatcgttacggtaagacatgtcatttgggacaccggcgaaatcatcattggcagtctaacatctcgattggcttccaggacaaatcagttctatctctgtcatgggccagaccatcgtgattttgaatcatcatcaaattgcgatggaattgctgggtaagcggtccgcaatatattcctcgcggccgaatctcgtatttgcgtcacagatgtaggtcgacgagcacaaaatgaccacactcccactaaatcctggataactagggtgggttgggagcatattctggcaatgcaaacttactccgaccggttacgtgcctatcgcaaagcaatgcagccatatctcggctcggagactgctgtgtctcaatataatgaattgcaagaggtggagagccatcgatttttattacgtgtactaaaagatccgaagaatttgatccagcatatttcaacgtaagttgagcgccgaatctcactccattgaaatagctgatggattcattcaattcagggaggcgggtgcagtcattctcaagatagcatatggctataccattgaaccagacaagatggacccattggttcatattgcaaaaatggcacttgagcaattttctgtcgctggaactccgggtgcctggttggtggacgtatttccggcctgtaagtgaggcatcttgcaaagacaggagaaacgatactaaataacgtagtgagatacatcccctcttggttccctggggccggattcaagcgaactgcgcaagtttggaaacaaaatcttcagcatgttgctgataagccttatgcctttgtgcgacagcgaatggaaagtggcaactatgatccgtcttatctgtccaacctatttgaagcaggcggatacccaccaaatggaacagaagaagaaatgattgcgaaatggacagccgcatcgttatatacaggcggcgctgacacggtatgttactactcttagtcctaagaccatctagactaacgaaaccgagaccgtctcttctgttcagacctttttcctggccatgaccctttacccagaggtacaacgtaaagcacaagaggagattgaccgaattttgggcggtgctcgactgcccacggtggtcgatcgtgcaagcctcccttacgtcgatgctgtagtgaaggagacccttcgatggcatcctgtagtgccaatggggattccacacatgtcagtcaaggatgacatgtatgaaggtcatcttattcctgaggggtccttggttttggccaacatctggtaagtctggtctaaattttgcgcaagatcgaggcgctgactatcactgaagggcctttgcgcacgataccgaagtctatcatgagccaatgaagtttaagcctgagcgctttttgaatgttgatggccgggagcctgaattggacccgcgtaccttcgtctttgggttcggtcggcgcatatgccctggtcgcattttggccgactatgccctttacttgattatctcccggtcactggcagtgtttgatgtcagaaaagaggtcagaaatggtcacgaggtacatgttgagcctgagttcagacctggggtgattagccatccgctttcttgggagttcaatatcaaaccccgatcggccagctgtgaagcgctgatcagatcagtggaagaaaccaacccttggaggggaagcgatgcagctgccctggatacttcctgatcgcgtcatcatctctatgatgaccaccctcagagatcaaaccaaagattttaccgggcgtcttgctcgtcgggcagggccgctttggcctgattcgcgcctgaatttaaaccgcttttaggcatctctttacaatgtaactaactaatattgtaattgattcctggatggaataacaggcccaaggatcccatgaacatacagcttttggcgctatataaatgcagttatctccatttttccaggtggtttactggcgccgtcatacatgaacatgaagctattcggaaatcaccctatcactatggagtaatttaaatagcatccactaccactaccaataacgaagatatttcaattctcaaaaccgcatttaattgctagatagtagagtgatcaattggctatgtaagatactgttggcacagcgattttactattggcacagtgattggctattctctatcatatagcatttagatggctttttaggaattgaactatgtctattattggtggtggtagatcgggtgatctccgcatagcttcatgttcatgtatgacggcgctagtaaaccacctggaaaagtcgagataattaaattgtatggcgccaaaagcttcagttggcataactaaggcggtatacctttctgccaggccaaattcaggaattaagacctcaatcaggccaaaacgaccctgcgcgttgtgccccttcgtactatagagatttgtatccaagctaattcccctcaaaattccttattcgtttatcatgagtcatattctgtgatcagtgatttgcgcgccctcttctttctgttttcgttcttctttgttcatattggccccatacgaaggatccatgcaaacttgggtcccattggctgggattctcccaggccgagctaagggcatttgcgccattttaattggcctgttcgggggggttttcatgtgggccatgtctcctcggagtccgtacctgaaggtgaggccgaagtaaaagccccgaagcacgggaacagattcattctcggttccacttcggggctgcagcctaaatactagagtactttcaaaagaatatatgaccagcatgaacatccttcccctcgtttgactgtaacacggctatttaatcctcccccccggccacactccaagtatttactgctatctatcagtatcttagcgctttccatcttacgccaaaaccctcacgacacacactacgttccaactcagatagcgacaatggcatcacctgcgccatcgtacaccaagaccactcactctgccacatatgctggcataaatccaactcagcccagcctctctactgcgggcaaggttgtggtgattactggcgcatctggcggcgtcggccgggccacagcctcatccttcgctgcatcgggcccccgagccctcatccttttcggtcgacgcgccgacgccctggcggaaaccgccgcccttgtccgcgacagccaccccgaggtgacgatccaaactcacgaggctgagctatgcgatgcctcgagcgtccgcgacgccatgaacaaggtggctgccgagtttggtggtatcgacatcctgatccactgtgccggcgtactggcccctgttgttccgctcctggaagccgatccggctaccttcctggacggctacaagactaccgtagtcggttcactggtaacggcacaggctgtcgtcctggctaacaagacagtcagccccaacgaggacaagccaatcacattcatcaatctgaccacggctggcattattttccccccattcgccggcatgggcgcctatgtcagcagtaagatggccgccgtcaaggtcctgcagtccttcgccgtcgagaacccgcaagtgcgtcttcacaatgtacatcccggtttcctcgaaacagccatgtctgctaagctgtcagagtccattaaattaccatttgcctttgatgaaagtgagtatcaactgattttgtcctttgtggttagtccgtctctgtgatccattaactaatgactactcttttccagtctctcttcctgccgacttcctcgtctggattgtctcccccgaagctgaattccttaagaacaagatcgtcttctcttcttgggacgtcgatgagctcaaggctcgcaagaacgagattttcggtggcccgccaggaactggtgagctctggctcggctaccaaggattcccacgattcataggtggtcaggctttgccaggtacccagtaggcgatcggtttcggtatgagaagccaccatccctggctggacggtatacatgcgcgcgttgattaagcaactacacgagccattcacataaagtgctagcacgaaaacctgaatgaaaaataaaatctataattacattgcttgctgtttgacaaccgagtaaagctgagagcacctggatggatgatttctaggcggcaaattggtcaatctttgctatatcatcaaccagacgcagtgcaattgagatgcccatattcctaccaaagtcttgtaggcgttggatgatccaccttctggtctcagcttttgtggctgggcattttccaaccatgtacaagcaccaggtcaggatatacccgcctgacacgctgccgcggaaggatagatcgacggagggagtgttggaagcggaggataggaattccaaagcctgagggatggtagcgagtatatcatctcctagcattgatagattttgcattgccatttgaacctttagctccagagactgccggacggccgacgtaagtgtaaggtctgtcacgagaatcttgttcaagaggtataacatgatctcgtatacgatcatttgaagatttctgaggttattccacactctgattgcccaagtgtccttatataggtcaactcgtccattatagcttagttttggtgcccagcaagcattttgggtgactgtatagggttcttgtgtggcgaggagcaaggcggtgtgttggaattcacgttccatcatagtcgcttcctccaggtattcaggccaaggaacttgcctagtgttcgccctaactcccatcaggaggtctgcgcaccgggtacctaagatccccagaagccaaaatgcaccagaggcgtcaatgtgcttggctgcctcttcttgaagctggatcatgtctttcggaaacggttcttcgttatggacacaagcaagcacaagatcagcgcgaacttggttaaacatgaggatcgtggccgtgctagtgaattggcccttgccccgggcaactactaacgctgcagcgccctggacatgtcgaacccacgatttgtgctcggagacatgctcaaacactcctaatgagattaccgacattaaagtgctgtccttgacggactccacgggcgatgttaaggcgacattcacattgcggatcgcctccgtgtatttggctcgcgcgaggtttgccaggtcagactgttgggtcgaattggccaaggccacgagtcctacggccgccatgctggccaccagagtaggatgctcgccatcttcgcgataaacagaaggaatatagttcaggcatccccgtgaagaggactgaccgctgacaaagttgcggaggaagtaattgacacctatgtcgtcggcgttggggctcaagctgcgggcgggggcaggcaaggcttgggcgggactttcgatcttcggtttcctgtatcgctgtatggtttggtcggtctggtcacgaaagacgaggtcccatttatctcggtacccaggacattcttggcgcattcgaatgcactgtccacaatggggagtctgctggtcgcactatgtagagacacgacaaattgagttctgacctgacagacaagaggaaaataagcagagcaaaggtagaacggcacttacacgtcgtttgacagcccggcagttcccacagcttctagaggctcgagggcgaaacgagttgagcggggccatatcgatacgccaaaaggagcgggcaaggacaatggcacaagagagggcgcagggtctgtcggaaacccgagttccctattccctagcaagtctaaggaggcactccccaataggctcagctcttagtctcgtgtccgtgtccagctgaagatcctccacggtcggcccctcggcccccacctgcagtacggatacccaggtaaccggtactgtgccccagtcgaaggaaatccgcgcggtacggaaagacattcggactatgatgagtcttcgggtgctattacagcctcgccgtcgtcatcacggttacacaaaaaccaatccgacattggactgaaaacatgaggactactcgtcccgtggtgcgctagtcctagttaggtcttttgataagtcagccagtcgttctaaatctttgagaaatacatctctaactgctgacatttcactatcaactctcattttaaagaccagaaaatccgacagtctgtctaagtattagcagccagcgctactacttcagtgacatcaaagacatcaaggccgagagccatccctcctgtcccatcccttccaaggtctccctgctgcgcgaggtactgtaacttagcaacggactccttcagctcttcctcggtaggcatgttgacgatcatcagatacatcacatcctccccaaggatcttaattctactgccagtttccttcttctttcgggcccacttctctttccaggtttcactcgggggaagaccttgagcagcccgcttcttgtcctgggattccttgatggcagccccagcacgctcaaatagacttggcttaggctggtacaagccaccgctcaaggtcgtgagaagttttccactattcacgggatggttggggtcattgtagcgtgaagtgaaggccttgcgtccggactcgggaacagccagcgcagaaccctgatgctgggcttcctatttcctgtcagaattgctctatcgatatgcgagggcgtgagtgaaggaattggtactcacgaatgatgcctgggactttcgatcgatgtagtcccgaacccaggttcttccactctggaaagtcgacttgggttccaggccatctctgacccgtatagcagctcggtcaatctccgggaaaactagcggtgcacactccggaagctgcatttcgcctctagttgcgccatctcccaatcgataatgctgcatgcgttgcttccatgcgttcatttgtgggtgctccttgctgtgagtgtactttgaaattgtcgctgccgcatcgaattcaggtctttcgggctgagacaggccggcattgacctcacctgtcgctcctgattgattaaaattgatctgctcggttgagaagagttggccaagtcgattagcttccgagttaggggagttcgaatcctgttctctttgctgcttctgcttcttcgtgagcttgggaggctgatccgtaaatttcatgatcatcgcgtattgaccacgaggaataaagatctcttggtttgccctatcgaggtagctattggtacggtgacgaatttgaaattgctgtgctgtgtccgctacaatctggatagctgcagcggtcaacgcaactgctaatgaaggggagaagccagtgatgttggctgcgcaaacgatgacctggagccacattgaagcctgtgataagagtgagtaagtaaacgcaatcccataatggtcaagaaaaggaatggttgtcaccaacctgactagctttatgaaagtcgctgatgaacttcaagaacacatcttggctgataccgcagtcggccaacacgggcgcatatgcacgcacaaatcctcgcttcttcgcgccaggcctgcgttgaggaataattacaggatatgggagtcgctgcggttgggctggtggtggcccagccagtgccacgagtgagcgaatcatgcgctctcttttcttcgccttctcatcttcagagtcctgtgcactaatctcatcggggtcattatcaacactcatgtcgaagtctttctgagcacctttcggaccagggtgagtttctgtttgatcatatgtgggcaatccgaattcttcggtcgcttcgtcgagttgccaggcagcctcatctccatccatcgagcgctcacggtcgtttctggtgtcgaaagtgggggtttcggtgtcttttcctgtctcaaaagagtggtaccctctcttttcttcgacttccgatgaacatctcgctttgtttatatccctctgtcgttccaagccgggtgagtatggtggaacttcatctcctgttgggagccctttctcgctgccccactctgagcggccctcacgattgggtagctctgcacgaccttcgaggccgactgtataagtcgtccgactatctgcaccgaccgagtccccacaatcgctttctacgccagagatagagcgaggggtctctgaaactgacacagaatctttgtttcggtgtcgggctgcatgggcagcttcagaagtaaaagcaataccggagccaatgagtctggcgagtcctttacccatggttgtggtggtggatggcgtgagtcgtaaatagatttgaatgaaggaatattttccaaagaccgctggggttccgaaggaagatcgttcgaagggtttatgtagagggaggaagactctcatccgcccatcatccggcctctatctatctgtacagtcagatcatttctatatccgggaattaggatgttagctcgaaggacagcaggagggatccgcgtctcccaactaaggcaaccaaaacggtccactttcacgacttctccctgatgacatgtgccattattctgtccattccagccttgtctcgcccagaaagcttatcctttcgagatcaaagcgtcgattgaacccatagatgactgtttattggccgagcatctcacatacctgaagtggactagcgctgtcgggaggtagcggatccagctggccggagctcagccaatcatagccctgagcctacctgactttgctatgtatgtctggactcttcaggcggggagctccttctctcggatacaccatgtggtatacaaagtgtgtcgagaagcccgctatttacgctttcactgagattctaaacttcggaggtattgcgacgctcaacactactggcaatgtcgtggacctgttaggacagaatatcccatctcacgagcaacggttagtaacaataacgaacaccctaccatttcatgctccacaaatctaactatttctttagtgccttctagcttacagttttgttccataatctggatgccaatgtctacatggggatttccaagatctgggagatgagcgtgagcaaaatcgcgaatgtggacagcatattcgtggagttctttgttcaacctcatcccgtcactaacggcaccaacatgttcggcctgacgcccgaaaggacagacaacgtcatgattgacatgactgctggctatgcaaacaaagcagacgatgtgctagtcgaacgagtgatttaggacattatgaacaagcaacgcgcactcttaaagtctcatcggcatctgatagacttcatctacctcacttacgccgatatctgatagaaggtcctctcgagctggggtgaggataacattgctaagctcagagctgccaccaaggaatacgaccccaacggcgtgtttcaggaacaggtccctggtggttacaaacttccagcgcaggtcttctgattgctctacggcgaatataaaaagatgggcgcgctctgtcgcacatgagctaagcccaggagcaagaacctactcacatctgataagtcagggctaaaggtataatataagcctttacttatcgaaaagaggagatttcagagtttacaagaagggatgatatgaatgaccggtttggaagcgatatgttgagggaattattctctaaagagatatgtgctgatggatttatggcatgttgttgaattggtagattctccactgcttgccatgtttccggagatggatgatattcacaaggtgagatgtgctggcatcatggctctggcgctttgtggaatgccaagaacatttccacaacacaagagttaatatgtgttcgttgtgtttcgtgtaaaaaaatgggttatatccttatgtcaaatgttcttatctttgaagttctggtgttcacgccaagccgtagttaaatcattctgagccgcttcgaccgcctttgacagatgtcccactagtcggtcatgtgcgattgctggcaatccagtagaaggggcgttggcattggcattggcattggcatctggtgagtgtgacgtaccagtctacttggtacgagccgagaacagagaagtgctaacagaaccggattctgaggacgaagagcgcatccgcattgtagcatgcggcagactgacattccagcatctttgttgtttttaaggacagaccccgacatacgtgctggttcaggaccactggcactctggcctccgcttctgcgacgatttctgagaaaaagcaactgttttcgcgaatgtggagtaagcggagatttagggtcgcagtgataatgcaaggggggcggcattcagcgagacaagcatatgtcatcgttgtaggcggcggtattgttaggttaaatcccagtgagccctcggagccaaaaggcggagtagagagagatgaagagtggctatagttgtaagcggacagaagattcggaagcgtagagtaatccaacatcggctcatcagaatcatcagagccaagggcatagtccatgcagaaatcagagtttgtaatgggaccagattctgcacatgattccaggggcgggcttacaaggagagaatgcagattggcagtagagctatgatcaatgttcaagtgaacatcagcagcctcgaatggcggttctccgaatagactgttgtttgcagcgaatcctgcgggtggatttagcggatcgctaggttcagtaaatcggggtatagttgaaagccgatcatcgtcattgctgggaagcagcaccgggaaaggccccgaatccttgccgaagtgtatatccaaagaacccagcggttccaaagatgtgtgatcgaaatcgcgagtcttatccgtgagcggcgtgacttgacctaaatgccagaataggccatgaagttggtcatttggtcgggcgtgactcgaatgtttaatggagtgccccgagtgacaccgatgacgaggacatgtgcacggtgacctgcccatgcagaaatctccatcgttaatgacaggagtgtacatattggccaaaggccaagaggtcgcaagatcaagatgtctgtactgaaaaccttagaagccaggaagcagaaagaaaaaaaggtagagaagtcttagacaaaggtcacctaatcttagaacattcttccacaggacgccatccattcatctctcaatccacatccctgcaacgagaaagccccaaaaagatgatactaacgattctcaacccgggtgggcactcacttgtatcaggtatagtgcatagcattagtatagcgcgggcaatcttctttggtgctagcccgctcaccagtggagaatagtatttggcccctttaaaattcccaaactgtgttcacgagtcatgtaaatcggtctggggaacgtcgatgaaggttggtaaatggccgataacttataaaggttgtgtttgcctgggtagcaggaggatggtaagcttagtagggtgaaggttggcctagtccctcggttagctttgctggttagctgtgctggtggcttgaaagtgtcgcctgtggctccccgggaggtctgggctcgaagatgcccaggaatgagatcgatgagcgagggatgaaaggccaggaggaagcaatatcaatatgtctgtattggggggaagaaaggaaaaagggagattaaatgacaatgacgaatccccgattcaattaccattaactgcaaaacttgtaatcgtggctgagcaggttgtggtctcccggcgccgttgaggccgctcggcacgatctcccactcgcgctacgttggtttctggtcgcgaattccagttgatcttatccgagctttttcaataacctcagtctatcgtgtggtgagtgtaagtgtaactgacggagccgaaacctttcgcctttgaagcttccgctttccgcgatcacacccatcgtggaatatccaaggaatattattagtttaattcgtgagagaaaaacattcttggggcttggtagccgtatcttgactcttgagcctaaaaaaactcaaaagaacatttgaaaccagcacggcgcttacaaggtacagccctcgactagtacgggtggcatacttagtggcccaaccccgcaccgaaatatcatttcccagtttcgttcacattacttcggtgccttgataccggcaagatgaaaatctctacatgtcttgtgccgttgatgggagtttacggggcagatgcgaaaggtagcttcctccagtctccatctatcgttgccaccaacatcaatcccgcagaagccatccataccacaaccgttgagtatgatgggaaggacggtatcttgttgccccaagacaaccgcaatggatgggtcaatcctgaagatttggctcctatgccacagtgcatcgcccagcaagatcagtccacctggctgcgtgccatgacgaaatgcaccagcaaacgatgcacctcccactttgcttttatctgcacccaccaccaatggctgactcaactcagctgcctcagcattgcattctcccccgacattatcgaaagttatctcccatactgtggtcgatcggttcttgccaaagcgcagttgtatcaatgggttcatattatcacaggtcgaacgtggcttatcgatgtcggcgacgcgagcggtctgaaaagtctctccccacactccctagctgaagggtatgcagccgttaacgtgattcacaatgcaccaacatgtctgagcgactcggtctccgcttcatcgatggaaccattccgacatgtaatggcctcctgcggtttcacaagcactacccaacacaccggaaacgctgctcgtccctgggagtatagtgaaaggctacgttctatgatcgctctagattttgaaactgttggttacgatctcgttcagcgtcgcatctacgatctggtcctgcatcgcatcggcgatggcgactattttgacaaagattgcttctgcaacaccttcaatatagatctcaacaatgaaccttgttcagggtcaggacaactagacttcacaaaggagcgtctctggatttatgccacgtgtgggtcgacatccttacccgagaactgggcggacacactcaaaaccacccaattcgcgtacattcccatcgaagattggcactggcccaaatgcgtcacggatatgccggagcaagtgattgggctcactgatcagtgtgcaaccgatgcttgtgaggtcggtggctactgcaaaatcaagcgcgcagttgacagggcttgtttttgtcgcaacatcaattatgattcctgcggagggtcgtgccagatatttgagacacgaattgactatatcaagtggctccatgatctttgtggcaatgtgcaggactggcacggtctgccagataattggcgtcaattagccgtcccgactaccctcgacatgattccgtggggttggaaattgaagccatttaacgattcagacattacctataccgcctctttgggagacgcaagggcaaccgaaaaatgtgcctcgaatgagtctaaactcacaagctttgctctagtcaatatagctacttttcttggagtagctctcagccagagaataaggataatacgtcgagtcgcacgccgccttccgtggaacccgcagccgtggccatgggttgtcaagggaacattaatcgccgccctacaactctttgcaaacctgttcaatattcttcttattcaacaaacccctggctatgagaacgttcccgtgatccaattaatgcttctctggagctcaatgcctcggcctacttggctgacgatttctttgattggtgtaccaacctttggagatttgaagttcttcgcggccgggtcttcgctatatgctgaagtgatcctccagtttctatcagcatattacctgcttatgaccgttcattatggtcgaaaacaccatttctactttggaggcatggacggagcggagagggggggacctgcaaaaatgatgtatgccggagcactcgcgtggcttatcatagttagcgtggtgattgctcaggtaatacgggctattaggatgagcaggttgactagacctgttttcgacacaccagactggcagggaggcaagcagacaacatcgaagattgaggaactgatggaccacttggatgaatgttgcacagggttagtggagagtaggggctcagaagaaacaccgttgataaagagcaaaggaagagatcacacggactatggcacttactctgtgaaaggccacgatgaccgggtttccaagaaatcatttctgggattgtatgcggctacgatcatcagcatgctccttctctggattgcgcaatggctgttttggggtggatttattggtcttagtgcggaagagtacgtattgcactgtcattatttggtctatatcaactaaccgaatataggttctgtttgcctcaacttagggtcctcacggctatctggactgcattctcattagtaggcgctattattattatttagtcaagtttattgtctacttcgagccctagatctctgaccgtgtttcatgaactatccaaaaaaccggctctcataacaacattactctctgtgtgacatattgttcggccactgggcatagaagatcaacattgcaggattggtcgttgattgatgccggcttccccatctcgagcgcgaataatccatcccagcctggcatattgccccaccatacgcgttttcgtatctccccgtcgaccgcaggccagggaccggagtcgatttgcagctctatctcttgggctacgcgcaccgctgaaccaatccacacctagctggccgactttgagtcggcctcgtagagaaagatgcttgccagcaaagcggcctgagctcgatccagattaaagttgtcatgccagatattgataattccagaagatgtgcgaatgtatttcttgccttcctcttcgctgttcgactcctagaccctagtggaaagtccacgctgtcacgatccacatggattgctatcacataataactaagatccagctacgcagtcctgtagtttgagtattcgcattttcgctttcgtacactacacaaatgtctcattgcgagtacaaatggtaagagccccaccaatcatatatccccgagcactaacatacaggaagattattggaagaataataccaatttcccaacgtaagataggttttgcctccctttaatctttttcaaaagcgtctaagcgactgacagtatgctgacgcgccacagtggcttccgcatcgatttgtggctgtgatggtggctttttcagccgcagccagatcagatacttgtcccacctaccaaagcgctgctgagcagctattgtttcgaagatccagtatagcacggttgtaaccgttacttacaatagagcttgagatccgccaaagaatctgctcaattcgagaaggaaagataaaataccatcctatgaggtgaaaagaagcgaatgccgaggtcaacaaaacagggaggatctttcaaacgttccgatattcgggaatcggtcatttggaaagcgccgcaagggcctttcgcggtcatcaagacatagaccaaagaaccgcatcacatcgtaactacaagtgaaagattgcttggcgataaaatcgtggcggtaaggtagagcggcaagatcaccagcttcaaggagaatctcggtcgtgctaacttccatgctaagcacaattccggtatgtacatcgcttggtttgtgcatccaacaaataaaggttccaaaggtacaaatcacaatagcacccgcgaatagttcaagcgtagtggtcggaagcttaagaatgaagcgaccaaagagttggatcatcagccaagtagcctacgccatgctgagcagtctggcgagcgtatccgtttttgacttgtcccgtatctcgctctgtgtaattcgtgggcattccaaaattgcgggttcaaatgagcaaaactcattcgacttgttgatatatgccatgcatctgaggcccctgagatacaccaccacaacaaatcggccaatgcagcgataaacggagggttattgtctctcgcggagactatttttggccgccaatcgcgacacgtattcggtgtgatgagttccacagtcgcgtgttgcccgcgaacgagacgcttagagatttgagagaaaaagttgcaccccgccaagatcggttcatctctgaaaatatttcggaatcttcctgggcttcctccaaatcaccacacgttcagatgctcgtggaagaccgcaaagatgacccgacgcacgatacgctccgctcgaagactcccaattgttgactgggagcttggcagccacgtccaagccagacaatcagtcataccggccaactattggaagaaaagagctgattccaggatgactgcgtgataatgactatattttggagggccatccaatgcccacatattcttacaaacgattattgcgcctgtggcgttgtttacatatcgaaacaatgaacatctggacccatcttctgggctcaatggccttcattgctgttggatttgaacttaatcacactgtcccgcgttctcaagacctcaatttcgaccgcggcgatgtatttgctttcgggccctttacggcctcggcaaccatctgctttggcctcagctcggcgctggatttcacactctaagaagccactcttacaatatccaccatctctggggcagactggatatcctcggaatctgcttcctcgcccttgaagctggtacatccatgacatattacgcattttattgcagacccttcatccagcgggagtactgggggctcaatcttttttccgctattggcgctgccttcgctttgtttgacaccggcggtggaggtaacaaaatgaggactctgcgaggaggtgtcttctcccagctcgctatctctgccatgttgcctatcctccaaagtgtgattgacttgggttggacgcgtgcgagtaatgaaattggggctgggtggtacctcgcagaagcactctccctcttgactggagtgagtgttttcgtctgtcgattcccagagagactgagccccgggacctttgacatttggggtcattcccatcagctttagcatatgtttgcagtgcttggcggcgcttttcatgttattggtttggtggctgcaggcaactaccgtcggatgcacaaagtctgttgagttaccccgtagcacggtcttcttagactcttgcattggaccattcgtacctgaagtaatgtagaccaagagctgccagcatagaatttttcggtactcctaggtcttcatcgatgtacttcgtcaataatagctcattccggttgtggttgcccaggtgcatgccgatacagtacttccggaaatcggtatcaccactttacacactctttcattgtttgttggactcggatgtgaaatatgagtttctgatctaagccttgtacggtaaaatacaaaactcattctatctcctttccttccttcctcctctctctgtcagtgcgagacagtcaatacatacagtgttttctccatttgattctccatttgactgtccattgtatcgcatctctatcaccggtacggagtagagtgcttacctataagatagtttgttttacggaagacgcatatacagcggctgaacgcttgggcattgtatattgcttcgactgtgctcttaaaattcggccacgggctcaaagtcccgacatattccatcttgtgaatagcagaagaggtggtcctataagtaccaacgttcaagggaggtagtggggcctgaataatctgtttggcacgcacccgtgttgtggccatagtgctctataccaaactacgagtcagtatgggctgcttactgtgacgtatggatggggatattgcttatgtaggacgtaggatggagggaatgttaggacgcattgtgcagtcgatgttggtcgaggagtcaacgttgctcgaggggttgacgacgaggaatcagcgacaagaagtcaatgctgagagatcaacgttaggggatcaagttcgagtattaggttgttgtcaaggaaggggtgggaaagaaaaatgacagagactccagtttcaagacgtccggtgtaaattccctaagagctctaaggttcaattctcaccccggtgcctaccctgtccttcttctagactgtcacatggtttgcgcccatcgatgtgagctaagcacgcatcctctctaattgattattgacaaaatacatatgaaaatcagcttaaccttctagaattgcagcaaagattggaatcatcgaaattgtgcactttggctaaagcaatggacattcatgttgatcaccaagtccacttagtactgtccttgtcccaaccagccttcctaggtggtatagccaagccccagccgacaaaggtcatatctgtaaatttctcttcggggtcaagggaggcagattctcggaagcctgcaatgtgcctagggatagtcagcctattctgtttagcaccaggtgtacggaagataccacatacatcgtctgtgtagcctcgtcgtatatgatgttctccagcccgggcatacctggctcccatccatatcgtctcaactcccttaggtctgttagctttactctggactggtagaatagggacttataacatactcccagacaacgcggaacttcgcacggacggcctcacgtaatggaccagatgtaggatcccagactttatcctggttcagtgactttccggggaccatatcccacacaatatgtgtaatatatccatctgggaccaggccatcattgccttgttttccttgtttataggcgaggagactcggtaccacgggacactgtcgtagttgcagatccttcaggacgtctagttctcgatgttttcgtgcagcggcctgtcgttgtcgaacctcggggcgttcgtactcagttccttcaataggaacctagaaatagattcgcatgaacgccttcttgtcgctgtctgccgcactgtgacagagacatttaaacacggcaaagggaggcccagcgccaccatcaagttcccattttgtcatttgttggacatcttcggtcaggttctcctcgataacccacttctggactgatggtgtggcaaaggtaacttctgtacctgtgtaaagttcagagaatccgagaatagacattctgacgaagaaatttaatgagaacgccgataaaagaagcttaggaaaaaaagaagaatgagggaagaaaaattgtgaaatagagttgtgcagagaaaaaggattcaaggcgtaaaaatgatgtgtagttttgtttggcctaaattctcaacctcgtcgatcaggcacttatattccgattactctggggtctttcagacttgaaatagttcaacttcattctgtttacattttgcttggatcatataatctacacagtctctccctatctccttctcctgcatcagtaaaccttctcagataattcgaaactggtcacatgtgttatctgttctctttacctcgggcaaagaccgatacctccggatactgcgaaatgacctcctcaagcggagtcgacgatgctcgacggagcccaaatcccaaaaaagcagtgacagttcggtgaacaatttcgaatgccttggcaccatccaaatttccaaccatcctttgcagggccggtacattttgaacaggaacatccagcagcttcatcagataggacaagtcagcgaatgcgtaatgttgcccctgggcaagttccagctccaacttccaaccccgcagactcgaccagaactctgcccacgatgagtccgttgtctggttttattttcatgtccaaacaggaggaatggaccccgaacaccttgttgaaccaccggcccaaacattgacccgtccaggttcgctccggcaacaacacgacagtccaaacgcatggcttcagcagcagccgcacccccaactgagtgaccgtacatcgcgacctgccgagtcttcagacccgcagcccctgttccagggagtagagctgcgactccagcctttgtgctcagctgatccagcacgaacgacacattccgcgctcgggtgttgacgtccagtgggacctacgcgtcagtgatatttgcggcagtcacgacgcttccgtccggaaactcgaggaactcggcatcatagggatggtcaatagacaccacgatatacccggcgctggcgacggcctgtgcaatggcattgtagaacaggcgggtcgtgccaagagcaggcgagaagatcacaacgggaaactggaggtggcggcctttcggcggctctgggcacgcttggaacgagatggattggatagtcccgttgggaagtcccagcgcgctgtataggtcagagtagtattcggctgttgcggggggcaggtagtttatcttctcgagatcgattttgcagtgggttggggcgaagaccgaagtcatcactgcacgcgatccgttcttgggatcaaacgggtcgactctggtcttttcgatcattttcgccgtgttgtagaacacgtcgtattgtccgggtggactggggagcaccactgcagagatggacatagccacgatgggcaggagacgacaaatgagaagcatgataagccaagataaaccaatagaggaagtcgatgataaaaattgacgataggattccaaagtcaacagtcagagcactgtctgacctttatatatcacggagggaagggggagtggtacacgagcattctgcctgctaacatagcccgtagcaacttctcgccctaccgaggtaactaagtttcccgaataggaatctatagggcgttagttgatcggatgtaaactggtcatcaagtggaatctgaagccatgtagcgccttgtctcgcgatattacttcccaatcaggttagcgccatctggcacatcgttgtctgcccacagcccagacaggtctcgctctaatgtatgcactttcgtgatagtgttcatcaggaatatgcactatttgggagtttgccagagcatctttccagatcatgtcatcatcaacaacgtcgcaggggagaatggtcggccccctagacaagcgaaggcgggtgacgcgctgcctcggctgcgctaaacgatgcatcaaggtctgtggtgtgaaacttgaagttcatgagactagtgcagctaatccttgctagtgtgaagggggaattccatgtgctctctgtattcgacaaaacaccgtgtgcgttgcccagcagcaatcagggcaggatatgactatgtttgtcaacaaaacccagcaaaatgattttagaggaggacacagaagttctgctcagaagggcatggctgttgcaaatagctgcagctccgggggttcgcccacttcactctatcgggagggataaggatacccgcctgcttgattattttgccgcttttattcagcagaacatgttcacgacgagcttctcgtcgatagttccggacctgactcctctgatttcgacttccccggtcctgtacgatgtggtgatagcgattggtactttatatgccaatcgatgtacaggtggacacgcattacagggagagaaatcctcctatgtacatgccatgacctcttatcataagtcaatgggttttttgcggacaagtctgggaaacagcaatgtgatgtaaagagaggatattctctgctacattttttctagggctgtttgaggtaagcgttctatcagaacgagtatcctttatcgaatgcattaaatatgccttttactgacatcaacgtacctagttgctctcagacgacttagactgcccgacgacatctcagagggaatctatagtccataagcgagtcccagagagttgggtcagctcggtcggtcgacgtgcgggctcagccctccgagtagggtactgtcgatcgccagaaataaatgtagattggtagaggtgaacaggtgggccttgtaaggctaaacaagtctgtaggattggatgcggagatggatggtggggaatcggtgtcgatgtcgagaatgggcagttcgtaggcgggcacacgaacttacaatcattattaattatgaactcatcgttcctgatgatcacattaagctatacgaaccatggaagaggacaccgagagcaggcttagggagtaacaatcctccagttgggttttaaagaaaatagttgaatgaacgacgctttctatttctatttgagtctatgcgaagaagttcaaaccttggaatcagcagcaataattgcagctgccttctcggcgactgcaaagacagtagcctgaatatttccccgcggaatcaaagggaagataccagcatcgaccacgcgtaggttttgagtgccgtaaaccttcagtcgagaatccacaacaccacccctttcacgaggcatcatggcagtggagcctactacatggtagtgacaaacgattctctcgcgagctagatcgcgggcggtctcaagagttatgtcgcgagatgagttttgcaggcgccgaccgtcggatttcaagagagaagccataggctcggtccaagcgagagtttccaaccagcgaacatggcgcgcgtgaagctccaaatcaagagggtgtgagaaaaacccgggatcgaatttggggttctctttcgcatctgaggaggcgagatggacagttccgcgagaaaatggtcggttgagcacggcaacgatactaacaaagttctctggctccgtcatgccaaaaattccctttgggcttgggcccttgtcagggagaatttggaaaggtgccagggtgtactgtgcactaggctcagtctcatcctccaacatctgctgcagtagttgatattgggcctttaatcctggtgataggttttggtcttggaggtattcatcaaaaagccttttcagctcaccatctgcaagctccggtagagtcatgtatgcagatgccagtgaacaaagaccgagtggtccagcccctgattgctgccaagccgccatggctgctccagcgatctcgggattccggagagcctctccggtcatctgcccttcggcaacctcccagctgaacggaacaaacccgtgctcctggaggttttctccaacattggagttttcgataatcggttcaattccgtgggaatgaagaagagcggcgtcaccaataccagatagttcgaggagatggggggtcttgatcgcgcccgcagccataataacctctcgcttggcggaaacagatttctgaattccatccttgccggtaaactgcacaccggtggccctggcatcctgtggaccctctttctccaaatgaatcttatgcacaaaagcttcggtgatcaccctcaagttcgatcgcttggcaacttccgagttgtagtacgtcacgccagcatgactacgggttctggtcgtcggatggacagtacctgggttgcagaacgctcccttggcaattcccgacattggatccccgctagtctggtgattgagagtttggaataccttgggccatgcttcaaggaagctagggaacggccccgtaccaaaagagacttggagtgggcctgattcaccctgaacagacggatcgatataatccaatgaaagctgctctttgatctcggcagagggaggggtgaaagtttgcgactttttcaaatattgtgacaccgaatcccagttccaaccgtcgttgccaagtttctcccagcggttgatatcggtttgactagggtaaatagccattccaaggttgattgctgaggatccaccaagtgttcgtccgcggggttcggcaaggcatcgtccattgaggcctttctatcaacaagtcagcgggattgaacagcaccgtgcacgtgaaacgaggcagggtgactgcatacctgaggtgtgctggtgatgcaccagtcaaagtcagggtcaaaataggttgttgctgccagaccaggagcagcaattcgtgggtcatcaactcggtttgctcctgcttcgagaacgagaacgctgcatgagggatcttcggtcaaccgactggctaccaccaagcccgaagtcccgccaccaacaacaacataatcatattcctcgcttaagtcggtaagtaacgaggtatcgatggacgccatgatttccaacgctctgcaggttgaagtgaaaagggatcgagcggtgacacgcgggaagcgcggagatcgcagggaatcaagtcattattcaagactgttcaggcgacaagcttaacagccgagaaaccgtttcgctatccccaattgagatgttcatcccgaagccttactgagaacagaaggacatctgtcgactacgtacatctgttaagttcattgaacatgattattggccattgttaagagactaacctgatcagttcaaaatagcgtgtggtcaatagtacgagaccaacgacaagagaagattttggttgatcagtggagaagagtaggatgaagaacgtatcagaatcgcattgtaatttctgtaatttcggggcaaatatggggtctcccgtgtggcggctggcccccgggttccggaggaacnnnnnnnnnnnnnnnnnnnnnnnnnnnnnnnnnnnnnnnnnnnnnnnnnnnnnnnnnnnnnnnnnnnnnnnnnnnnnnnnnnnnnnnnnnnnnnnnnnnnnnnnnnnnnnnnnnnnnnnnnnnnnnnnnnnnnnnnnnnnnnnnnnnnnnnnnnnnnnnnnnnnnnnnnnnnnnnnnnnnnnnnnnnnnnnnnnnnnnnnnnnnnnnnnnnnnnnnnnnnnnnnnnnnnnnnnnnnnnnnnnnnnnnnnnnnnnnnnnnnnnnnnnnnnnnnnnnnnnnnnnnnnnnnnnnnnnnnnnnnnnnnnnnnnnnncgggagccccccctgccattccgagccgtgtctgcacataccttgcccgctagttacactgtagatcataacaggaaaattacttccttgatagagcgtggcttacgctttatttcttaaacgtcgacccctatcgctctatctatcaatccctactccgtactggtaggaggggatagtaatcctgggaattgtgattcataatgactgtgacatacccgctggatacaccgcttagccgcaatccagttatcgcagtgacggtactaggtgctctggcgacgatcaccaccgcgttgcgattttgggcgctggagatgagacgaatgagtccagaagcgtctgaatatattattttggccgcattagtaggtctgactggaaatttatgatgcaaaaacccttgcagttacaatcaacaggttattgtatatgccgacattgcactcgaatatattcgtatgtttggagatattcccgagctctccgtcttcatcttcaagaaacggtcagagtgactgacacatgaacagttacttgactatggtcgtggaaacggccatcagtacgacgaagaaaaattttggacacggtcgacattgcatcgagctttgccttttcctgcaattggcgggcctctcagccaatcgcccttaggcagtactgagcttgagggtatcgccatatcggggtcagtctgctccgagatccgcagggcagcttcctcgcttatatattcgggataggtgtaacgagcttccattactgcttgatctagccctagacgatgtgccggtttttcggcagaccgagcgaacattgcaaggaatcggtatctcaaccggtaaatgtttgccttactcaacacttcttccttaggtaaaaagtgttagttctattactagctttacagaaccttatatcaagtaccgttattacttataatgtttgcgataaaaagtttgcagaagtcatacactttcagcgccatactaatgattcttactcgactgtgaccggacctctatggcgcgcagtttcccagtaatgcctcgttatattaattttatgcaaagaatatattaaagccttggattcatatagatagaggacctaattagctttcatacgaccggtttcaactccagccacaatgctcatttcgaatcctagcgcagctctgcgatgctctgtcgcgaagagagaactggtttagagtgttgacttcgattacccagatgaaatcattggttatgattttggtacaatgatccaaatgtcctgaagcatcagactatgtgctgcggcaaggagaggactggctctatttttcttgttgaactacctgctttgttgctgagggtggagatgtgataccaatccgtattaggcttagtgccgcagtccttgttacccaccgagggagatcccgcacgggaagatcccagtcaatcacaactggtgaaacaccaataggtgaccaagaagggtaatcatggtgtttccacctggcatcttgtatactgagaaaccgtttaaaaaaattggcagcctagcccgaggccagataccacgtatcttgataagcttggaatcaataacggaattgccaccacaattaccccatacagtacttatattggaattcacgtctccatccccaagtcaccacccgggtttgtcgctcagcgctgaacacactcaaggtattccaaccacctacgagcctttcgttcgcactgatcgatatgttaatgtctcaagccccgatttcaacgccgatcccgagattcgcgcctgtttgagcaacacggttcatgcatgtggatgtgcgaggcatctcccacaagagacgcataaccaaaaggtcttgattccctgtttacgattttatgcgcgcaatttgcctttcccgtaataagactaaccactctcacggaacagtccttctcttctcggatccccacgtagcaaaataaatcagtctcattgacttcagtaatgccagctctctacacacctttctagttcttgagggcgttttctccagtgtgggtacggatgtgaatgtgcaaacaggaacggatcagcagtgagtgcaccatggccttaatatatttcttcaattgaatttgactgtctcgcctaggtgatctgcccggttatatcgaaaacactttcccatgaaccctcccctaatacaatcaatgttgactctatttttgaacgaccgcaggtttaacagttgaattgcatcatcccgggagttggtgggaagaccatggggataaggacagaggcccttccctccctccgaatagtcgggggtgggggctccctggggatcttgcttggacaagcccggcttcccggctcaatgaaaatttgcgagcttatcaccaaagcttgatttgtcacacccatcacagattcccgtcatgagcagagaaaaattcagggctaatgtgtcccgatcggcatattcactttccttgtggatattcggtctttggtttgcgatatatgtgggatttgcttttcaacgcaaagatataggccgtgttgcggtagtcgaatgtacttagggctgttcatatgttttcgatgtcgatattaatcatggcttacatgaaggtagtggaattggcatatatcacttgatgtttgcttcccaaaagcttctgagatctcactgactcggcaagggagttgtttccaatacgaaaacatgccagaagtgtcgctttgaatcacggtaaaaaaccggcttagaccgaattaccctcctgtggataagtaaccagttggctcgcgagaagagatcatggaggcatctcagattttttgaacccatttcatagtaatctgcttcgcttggacaaaagccgtggtatattcgctttccctggtagtgctggtagtgatcgataacgatcagtggcccaggtttgactgcgattggctaacgaaattgtcgaaagtcccacaatgctgtatcacgtcatattaatcaatctcatcgaaccaggtgtgcgctgtctcgcgatgactgtgctgcagtggaagaaagtcagacgagtcctttctcgaatttttctacacattcggccggagaatgcgataacatggcgagcccaactcacctgggcgtgttgaaaactcaatagtggacagtcccacagggtcagcagcgctagatgcgtcggagtttaatcttctgcgaagggaccttggcggcgatgtgtttctttctgccaccgtggggcggtcaccaagagccagagggagcttagaagtcaatggcgtccatgtcggagagattattgccgtccgcgatggcgcggtataatcttgggggggtgttcaacaaaagagggtcgaaatgttactagcgcgcccgaggaatattcagcacccccctctgcctgatgattgtaaggctctcaacgaccttactaagctcatcccctatttattctgcactttctatagtatataaaagtcacactctcaagtactcaattggctatgcccgtactagtccgtactgtaacgaccacgttccagcagtcttcagtacttgattactgatgtaaccttgtgtaattttgtagttacatatgagttgcttacaaagactgcatccatattaactagttttcattggctgatgtaggtaagccacgtgacgtacaggccgacctcccggtcgcgacgccaatcccagcctcctctttgccccctaccctggcccgttatcccctatcacatctttcatcatcacgcggagaaagagtggtgtcgctcaatactgtccttgttgccggtcctgccattcctgtggttacacaggactctctgatttcatcgcttgatctcggattgggcacgtacttgggacttggccgtaggaggctttacttctcttctcccatctcatctctcttcttcaacctcccctataccagtctaggctgctctcaatgtatgaggggccgttgctattaattaaacccatattcgcccaaaatgggcaccaaatcaccaaactctaccctgcagatgaagaaggaagcgcgtgttgatacacccacctccgagacttcttgtgctgttacgcttcgcattggttgtgacaaaattgcgcacaatggattcatctcactttggtttgaagggacactagctaactcacccgataaaccacagaacctggtcctgaatatcatcccaactataattttgacttgtgaatttgcggctgctaccgaaatcagagacacctcaacactgtctttgaaactctccgagcctggcgcggttttcggtcccaccggaacagactctctcaggccttttgatccggacgattcgaagttccactcatttgttgccatctgtaaatccacaatcatttctctcaatttctctcgccaccatttcgagaaagtagaaattacaaagatatcatctatatcgcgctttctacgacaaaaatctgtccagcccaggtgtttcgaacatcaacgacataacttggctccaaaacaccagaaagatttcgaaccgccagccaaactacctccatatcgtgaaaaggatgtgtcccaacaaatcagagaggtgcagcctcccgcctatcgcgagcagcccgttgacgagcaggtgattgacgagcaggtggctggcaagcaggtggttggcaagcggcgcagaggtatgtcctttaacccagctatactccacagtatcattcaatagcttacacatactttccagacacattgtcaaccccgcctgaccatgaaagacggagacggttactccttccatcgcccaaattaagagaccatgccgaggaacccaacacaccgggtgttcttaccgaacccaatacacctagtactcatctctccatatcatcattccgcccaacatgcttcgcacacacatccccggaccacatcgaggacaggaacttcccacaccttgggcaggcactctacaatgctccggatgacctgatttacgataccacgtcgagctctgagatttctccatcacaatctattcgccccacgtttttcacgcatgctccttcccctgttgctttcaagcataaaaagcttctgcatctcagccaggaccccagtcatattcctgatgagccaatttattctattgcacggagctctcatacttctccgtcacggtctcttcgtccaaccagtttcatacgtacttcgtgccccgatcccgccgagcgcaggaagctcgaaagtcttaagcagggaatccgtaatgctcccgacgagctgcttgttcaaattctcaaagagacgaatcgtgggtatctcctcgctttgccaacagacaaggccaacataccgacgcccaagttcgagtttagatccaccaaggccgcaacgctcgacgaacggatagatcgattaatcgatcaaaagtttgataaaaagtttgaagaaagaatggaccactatctcgaatttggcgattcacagtttatcgaaaaattaactgaatgtgccacaagtgagtgtcgtgagcagatctccgatgaattcaagactcgcggggttgagcttgaggaagagctcgaaagttctatattggaggttcgccaggcagttggggacgggctagaggacctcagaaagcaacaagcacagtgtgaacatgatatcaaggatctggaggccgaagtagttgcggctgcggaaacggccgcgaagaacgctgtgtcgaacattttgacacgctcgcacaatacttctaggcagtccttacttggtagcaacttctgcccgctccattggctcggcgccaatacaaggcgaagctctacctagaccgggtactaggcttacatcttggatctttgccgtctcgtatcttctcgcgtagaattccctagtttgcttttatacttgtatgcaggttgctggcctgcgaggacttcgccatgattccgctccacggaaatatccaagccgggcttccacaaagaatgcaggaccctgcacaaacgagcaaacaaggctcagagacatgggcaggcaccaagcgagattctaggggacactggagggcatgagagattcgtagcaacaaaagaagaggatcgccaggagacgaatgaacatatacagggacaaagcgcatcaagatacggtcaccgagggaccggccacatcgtgcaggtgtgggggcctgcaaaatagataagggatcgatcaccataccataccttctcaaagccaagaacgatctcacggtaactccaatcccgatcaataaagtaacctgcgatcgccataaacgcttgtacgaaggttgatgtcctgcagtcaagtgcgacggatattttttcatttggaggtaaggtagaaaggatagtatgatactcctcatcaactaatttcttgagtagacgttgagcagttcgaggatgtagtaatattggtttgtgtggagccatctgggccatcttaatatagccaagtaaatattctcggctaaggatccggaatggtagattcaatgcagtgagacattcaatatattatctctcccattgatcttgtgagaatgtagtcgtctgggcggcattaggttccagacagtactaatgttacatattgaaaataggaaaatagatcaaattacatacagctgcatgttccatagtctgttttatagactgttatctttctgggttcaagccaaccttctggcatctagaagaggtaagatggcgtttaattgtattggtgccgctctgttttgtacgtggaggtcggagacatttcctacaagatcgacacttaaccaaacgttacgaagtataatgtgctacttggtctaagcttttccaaacgtctgatatatgtcggttgtcctatcgtagtcgtcattgtgtggctgagtcgccaacccgattagttggtcgccaccagtcaataaaatcggcctttaatacgttatttatcgcattaaaaaggacgtatggcttctggcgaccagggccaacgcgttggaggacaatattggggtcaaatgggctctctatgtaagggatgtccgcttgagagcttggaggaagaaggcttgaaggcccagcagaattgtggctttattgtgacatagtcaaccaatagaccaaagatgatgcaaggaatgatgatatgggcaataaatagacattggaaaggaagagaaagattaccttggacaaatgacaacttgagcaaacggccttgcaacaaaagggctcagtccaccaatcccaaacgtgctaggaatacccctcaacctcatctttcgtcacatgagaaaagataggatggcgcgaagtgccacaattggatctgctctcccatagacgtagcggctggtctagattgtgggttaggcgctgagaaagggctggtcctgagccgctcattcgctattgcatatgtagtagccacctcaaagcactgctctttcactaccttcagccaattatggcatctgttgatagatgccgcagaggcaggtgctatgagcgactgagccattgtacagcactcgaacccccttagacatcgtatttagacatcgtattcacatctcgtaggcagggttccccgctcaaccgacctgtgcaagttcgtcctggtatattcgtgatctaaggtataaatatcgcaggtaatatcgcattttcctggtcttcagtcacttctcaattccaagtcttgagcccagagacacgaaagtctgattgtgcgataaatatcaacctcaacttcttcaatatccctacatactggacctagacgacttctagtattatctacatatatttttcgatcagatcttcccaaggtaagccagtcttcaccagtgaattttagcttaagactaactcaatccgcagataactattcgggagccatttgaaatcaccaattcttgccactggtctttagtatcaaatggtacacccaagaaatcctgggactgcatagatccaaagtataaagactcgattacataccggccccccaaataagattacccagataatagatggttatttatcggccagggaaagggggttaaggaggaaggagtagaggggaatagattcaagggagtgttaagaagtatatcaggtgagtttaatttgactagtagaacagcgtccaaatttagtcaatagactttcgagcagcactgaaaattcccccataaatagtttacctacctaccacactaggataaccattgtagagagagtttcgctcttagtagccacaaatcctaatcaggtagagactgctaattttagagtttagttatttacggggggcgtgagcacctcaaccattttaaacttatcagcgtcggaaaccataatgttttgtgacaactgtagcaactgactgtatacttaagggctgtttaagagggagggccgctggcaaccaatcaatccaccgaaggcagaagcagccacctatcacccttctcttctaccaacttaacactccttttaccagcacagcgtcacagaaatcatatatcttataaatatggaagttattcaaaagaataaggcatttaaagggattaatggcaaaatgaaattttcctctatccaggtttttattcggcaagatggcatattatattccagaaaatagacgaatcgattaaattcgccaaagacagtagatgatctccaggaactcaaggaaattccaaccgaggacaaaggcccagaagcaaaaaccgcctagtcagctatctatatgaaaacagcaagtctcctcacatatatcgatagaaaccttaagaagcaaatcgctcgcgaagtcgaaacatacaaaattctctgtaagaacccccatccgaacatcgcgacctaccatagctataaagatacccgcggtcaagtctctaggctatacttcagacgatatacattaacactacttaaagcagtcaatccttaacgtctaggtaaggtcgctttccttttaagtatacgcgaactagtgaaagcgaatatgaaaagtggcctagaaggaatcttagccgctatcaagcatctttattctttcggacttattcataacgatatcaaccctgcaaacattatacttaacgatattagtacatttattcttatcgatttcaatagctatcgatctatcggagagtcgtttcgcgacaccgaaacgaaaagaacccgccactagcataaccctgctgtcgatatttcgctcgagaaaaacgatcttaacgctttcagagatctacaaatctggttgactagaccggcggatgagaaatttgtttttaaatgaatcgctttctagtaaattgtcaacacccaggtggatcagctagggcgatcattatttcaaatgtgggcaatcatgagtagcgaaaccaatcacaaccactatgctagcaagaacaaaataagtctggtattttcattgtcaattctgaatggcatctagagtgtcgctagtccaaaagaggcaaccagccaccttctagaatcatgccccgtccttctgtgataggtctctacggcggtgtagttgatgtggtacatgtaaccccctttgaatttttgacaccactaactacaggctgattagttagaatagtccagcttgcgggactttaatcttgtatctcatctggttctggccccccgctcacgtgtcaactaatactaaagttcgacaaaatttgtaagtaaaataatattataccaatttatatactagtgtattcctcttaccttttataaccacttgatatcggctattttatagtattaaagcgggtatacagtcggctagttaaatcaaaaatataggttaggattaactatattaataaacttaaattccttaaagtatacccccttatataaattaaagcttttaaactagagataattaaaaatagcttctgagtagccagttcagtgatcaggtacttttaaagctaaatattcgtcttcgaataccaaccctctaagccgggatagcgattaggacccaaaaacgccgtcaaaccatattcaattataaaagcaagctttattaattaaagcattactttatataagatcaagacgccctccgagcttgctcaattcggctattaaccaggctttaaaagcctgccagatgactatataattgtaaaggtatacgttatgcaggtgtacggcctgtcaactgggtaagatacaaagggctttttggagggaatacaatgtattgatgatatgctaagactaattcttgctagtctcggaggggcccctggggggtcctaaactataaggaaatctatctgcctatatttatataacgaaccccttacggatcgatatcgaaatagatgtatgataatatagatattccttcctgagcctatacaggtttacatatatttccctcttatatagacctttatccgttacaattatctccccctccctatgtggatatccttatccgtatataaatagaaacgttaaaggataaaaggataaagaatcggggaggtatcggggagtttctataataaagaaagtaaagtagtggatattattaaagaagataaggtagtatataataatttaaagaga

SEQ ID NO: 69 - DNA, 53928 bp, Penicillium roqueforti; identical to SEQ ID NO: 21
  misc_feature (1304)..(5918): n is a, c, g, or t
  misc_feature (9441)..(14428): n is a, c, g, or t
  misc_feature (21327)..(21571): n is a, c, g, or t

SEQ ID NO: 70 - DNA, 29939 bp, Penicillium roqueforti; identical to SEQ ID NO: 22
  misc_feature (3252)..(4738): n is a, c, g, or t
  misc_feature (11014)..(12231): n is a, c, g, or t
  misc_feature (25939)..(27449): n is a, c, g, or t

SEQ ID NO: 71 - DNA, 28527 bp, Penicillium roqueforti; identical to SEQ ID NO: 23

SEQ ID NO: 72 - DNA, 28217 bp, Penicillium roqueforti
  misc_feature (20956)..(21050): n is a, c, g, or t
  misc_feature (25454)..(26704): n is a, c, g, or t
cgggttgtatgtggtggcggctcgtatgtgaattacgttatatagattagtaactaggtactagttactaagaaaagtgaagctttcctctaagatagatagatcttagatactagatcgagctcttatatctataataatagggattagtttattaattttatactagaagttaactaggtaactactagagatagtttaataaaaatcctaggaactaggactattaggcttataggatagtatctagaaactagaaaaattaagattaaactaagtaatatactatattcgctaaccttctatataaacctagtattatatatagccctataaaggaaaggaggtttctagtactaatatactaactatatataggatcctaataatctccctatcattaatatatacctataggattattttaatctatagattttcaataagctagataagaaggtacccttataggtatatactataagaaccttagtaaagctataagaaataaaaagcttagtagatatctggtactaccgactcgcttatattaataagtatactatagcaaagcttactactatagtagatagtattattattaaaaaagaagaatctaaactagaggataaatctctatataaaatatactatattagcagagtactaaggtagatctctagatacctagttagctatatatttagataattcggaagggtatattttaatctaatatagttactactagtatataataagtactattagatctcctacttttatattaagggtctaagattctattagattataatatataagataaaactagaatactaattagctattaatcaattcgttaagctagtaaggaactaatagaagctactaattaaagctttctactataataataagctattagctagaaaaatattagaatatagcttaataagtaatagtatcttaatctactatactctacctagctatattaagataaatggttatatagaaaggtctagtagaatgattattacctatatataaatactcttaattaaaggaaagcttcctaaagatctatagctagaatttgtaagtatagctatctagttactaaactatatactattatatataactaataagaaccagtagatagtactataggaagaggtataaaaggaattcggtataagtttactaaggattaacctagctaatattaggttatatagaagcttagtatactactatattaagaagtaggtaaaatctaataagatagttccttaagtagagattagcttcctagtaggctatcttacctctaatatttataaaatctagttcctatatactagtaaagttagatatattagggatatagttattaataagacctataaatatatactaatatataagaggtattaatagatcctactaccgatagtagaggaactataagagcttattaataaagaaattatataagtacttaattataagattattagctagtaggtagctataatagatactactgagatatagtataactttaataatagcttctagtaagctactaaacctatcgaataactataggaagaaatataggataggatataagagggagaagggtagtaagagactaccctgaattaggggataagctatataataagcctactaatacctaattatctatttaaagccctattagatatatttctaaataaactagacctactactactactagttatactactagaagaagctaaactagatactagctctagttagagggtagatactatatataaaatatagtaagttaactagacctagctcctaaaaactagtaaactataaggataatctaaggataagctatataataaactagaaagatagctttaggctaagctactagtactaagtaggtagattataggagatattaataaaggtaatataataattagaaagtatatatatataaggaagaactttacttatactaccgcaatagtaaataaagagctactagccctcttatatatatttatagctagtctatatatagagaagctagatacttaatactatagagataatcttcctctactactaaagtactagaaagatattatattataccccttttaagaaggtttccttatagtaataagaaaagagattaactcccttactaaaaaaggaatatttaaagttattaataaactaaaggataggggaaagtaaatactacctctattataggtctttatatataaattcgactaagatagctatcttataaagtttaaagcctatatttatatataaggtaatctcgaaataatctcttaagaagaaaagagagctataatactagtagtaagaatagtaaggataatctttatactagttactacttttaatctagatctatactagcgagatactataacagccttcctaaatagtaaactagatagaaggaaagaaatatatatatatatactagagggattttagatccttagtaaatattagaagttattataagtattatatagtttatagatcttactataactttagtaataagaagtagtaagtatcttatataagttagggcttaagtaagtccctaaagatctatatatttttattagaaaaggactaattatcttcttctatatagataatatcctaatcgcctattatatattagtaagggatagggtatactaattagaaaaggatcttaaaacctattaggagcttatagattatagagaagctagttggtttcttaatatctaaattatataagatagatagtagaagaagctatagctatactaagatagctatatagtaagtattactacttactataatttaattaactacctagctatctatactctactataggtcgaagaactaaagctatactaaggtattactatacctagagaaatttatctctactagtagaaggtaggaatcttagctagctatataactattattactagactagatatagtaaaggccacggcctagctagcctaatttcttataaaccctagcctatagtactataaagtaatcaactaagttatttcttatctctatactacttataacctagtaattaaatatagcgctaatatagtaactactaagatagattctatataatttgtaagtaatacctcttatagagattacctagattagaaaagcttagtaggctatatttactaagtatatagagggctagttaactagaaagctactaagtagctaatagtaataatattaactactaaggctaagcttctaggcctatctaaggtcgggaagtagctctaatagtagtaataactactagatactattagctttatactatcttatactcttacaatcagctgcgataataagtatatagttaacctaatataaagcgaggatatagtatataagataaagctctgatatatagatatctattaccattagcttcgataagaggttaaggaaggacgaatttatataaagtgggttactatagcgaatatagtcgctgatagactaactaaggtactccctcgctagaagtataataacttcatcagaatgctaaggatggtagatataggccatctggtataggccagtaagtctatactaggcttactaagggggtgtgtcggagtatgtaagtcagtataccggaggataccggaggatctattaatcctaacaatgtgtattgtttattttagtttatgtaatcaggctctataaattgccagctgagctagttcagaaagacagactgattgacacctatttattggaccatatattttatggatatggttaatccgatagttatgagcccggtttacaccgaacgagactactagtgactaattgctatagaaagtgtcttacgaagccctattaaactatctattccttcctcccttaacgaagctatatagttagctatcacttactactactaatagaagtagtatcaatcctctccgctataaagggcgaaaaactgaaagatataccctaatagtatatctggtatactaaagtataactttatactacctaaaagaacgtctgggatctatataacccagataccccggtagatactaggcctactatccttactaaactagtagaaccagcctaccccttagataataacgataagaagctttgataagtttagtgagacttaatagacttatataagataaagtatactagataggagaaataggctaaaggattaagtaatataaacgaatatatccttacctatcttaatcctatataccatctctctatcctactatatataactctatataagagactagtctacctaaaagctcgcttcgctaagttaacagtatataaagaagagatccgaataaactagaagttattcgctatatagaagctaactagagatattaaataatagctctaaaagtagaacttactaagggagtaagctattagcctaggtattagtaatagcgatactaatagagacttcctatatatagttaaggaagtactactaatctagtagtaaggaaaatactaagaagtagttatagataagaagaaatataatacttaagatcttcttaaatctttctacgctataaactaggagattagggttaaaactattacctctactaatactctgaaaagtaccttctcgacttagtaaaggaatccagaagctaagctagataaagagaagtaagagaaggaaaagtaggagaacttagaagtagtcgaaactcccgtttaagtaacgaaggtatctatatagctataactacctaaaatatcgggtaataacctactagattataaataaagtggcttaactagagggttttatactaagtaaagataaactagaaaaggctaagaaggtattagctaaagatactacctagaagtaataggttaagaaaacggtagtagaagcttagataaaaccttagtaagctctttagtaagttcctctataagtagaagtaaagccttaataagtggtaaataccactatctagactagttttactatatttatatactatagtctataagctaacgtaattcacatacgagccgccaccacatacgacccgccaccccattcaataatcgtgaatttcactgatgccgggacccactagaattccgtcgcagcatattgatgatgctagcactttcttcatcgtgggtcatagctgccggtccactaagctgtcgccgagttatcgctaacaagtgacgtagcatcgcctttatagtggggactaatttaaaaaggacaatgctgggtcaacgtggaaaaatattttgactacggatatctccgtggcattttagcaatgtatgttcaagccgttcctagcgagcagagtttttctctcgggtttgttgctcaatgctatgcataatttctaccagtttctgtgcgtcgtctcgagtccgttccatcagctcattctgttcgctgatccattgcagtcgttccttccagaaatcccaccgctccttcgagaacgatgagtctcctttccatagattccaatcgggctttttgtttgcttcagcaagggtgaggtccttctttcctacaaacttgaaaataatggaccctgcaatctcaaaaaaaggaaccatagcatgaacatcagtctataggccgaagtcagtatctcaagcacagtgatcatattcttttgcgacccacattcagcataaggatgtaattcgtagccacgcggccatctacaaggtgatagcgctgtaagagcgacggcgagggcggcggaagtggcaccggcccgtgtttccacggctcctgttctaatgcaaagacggggattcgcaatgctatgcttagttcgcgtgaaccagggccatgcggtggatatgcggaaagataatgcgcgcaaaaagcgctgctactgtgaaaagtgtaccacccttcaaaagggtagataccgtatcgcatttcccagtaacctgtaatcagaatattagcccctacattaaatcaacataaacgaccctctggaaggaatcttgggcgaaagccttgtgtccaaaatattggagagaatcaaagaatgggatggccattttgcatgatattttaggggaagaagaagtcacgcacggtcatgagtctcttcccaaatgtccttgaatacggccaagttcctccagtcttccagccgatcctggaagcgtgacgtgcgaacctgttcttcggttctatcaaggtctggaagagctcttattgcctctaccagcttcaaaatagcgggttgatagttcggcatctcaatagcagcatcccaaagtagccatgaaacgcgctcccctttatccacagcttgactctggcgctcttgaatcaggtcatcttcgttacgaagtgacatgaagcgatgagcagcgtcatctactggaactgcattggcagtgccgtaacgctcaacaaattcctgcaatatttgaatctcatcccaggttgggggatctgggtcgccatcctctgggtctggatagaagaagggtttccattcggctttgtactcttccattgttgtgatggaagttgtggtgatttgatctggggtcgccccagtcggttctgacaacgaaggcgtactttcaagtgaaagtgcttaggaacagatcgctttttcggggcagtatggtcatacaagagacaagcaaaggaggcttcgctggtggtcagacctctggaatcctaagttgctccacaatggatgctcttagcacccatatagtgtcttatgtatgtatcagcgaaaaatgctggccaagaagcgctatagccaaagtagttaggggtggattcgaaaagagatttgaagagtatattcgatttcgaaatcattttgcgatgtcattattcgcattcgaaatttctattcgaaaagttatgcggaagtctgccaagaaattggttacgtaaatgattggttaacgccagcaaatccacccgtgatttagcgtcgtcttgtcgcgcacgttgtgtataccaaatcctccttacatatggatctcgtaatttgagactctagcctgtggatcttctcactatggttgatagcagtatttattttccgcctacaatagataacagctcatgtactctcagtgtcattccagctgtaggttggcgcaatacagtaaacacttccagccttcaagctatctgagcattttcccgggtccaaagaagggtttaccatcgtgaagaccgcatgtgtgatactatactgaccacatatacccatataactatctccactcttggcctcgtaccatttgccacaattccttgttgttcctgtcgccagtgtcgcatttgcaggtggctcgaccttgctatacacatatccattcgattgagagggagcaacgctaccaccagtgctgcttccattgtgcatgccgccctgtggagagagacaaatggctgtactgtagatcttgcttgctggctgtagattgtcgcagttgtatgagacctatgggttgtatttgcgtacatcacgatctttcagggagtacgcgtactcgatatctgaacaattgtcgctgggttggatggaatatgtcttctcacaggttaggggaaggcagaatttgagtcccgaagagagggaactgcagtcaaggatctgattttgatttcctatgtataatgccgctgaagaaatgctcgtgtcttcggcgatcgatgtgcaagtgtcgccgtccacggtggtgtagaaattatccgatccgcagaatttagtttccttttctggggtattgcgagggatttccaggactgtggtcggggcattcaatccgcaacgcttattgattgcttgtaggactatctgatagtagttgtcgtacacagagtaaggggtacattgtatcatttgaaggcgttcggtatagcagtaagagcatagctcgttatcaggcattgctatagtattagggaccaaggtgaaattattaatgatatctgtcaacaccggttagatgagttgagtaataattagaggtgtttaacgtaccattgcaatacttccctgagctcttatccttgctgtatatttcgttataagcagcccaaatgcgaccaccgaatatctccgcaggcattctactgatgttatatccggtacagttaagttataccgattgataccatgcctagaggttctgaccataagttatatcacaaatcgactcagtcagggtatcgttattcagagaaccgtgatatttagcggatattattaagtttaagactgggtcgcatttgattcgttctgtcatcgccgactggcaaccgattggaagatcaagaggttctagtgtagaggtactgtagatactaaacctatcgaattctcttaggcctacggtttgatttgcactactaagccaagcaagaatagacgagagaagaccattcatattatccttagtataagtgggtattcccttataaggtgtgatcatttctataatagccctagtgtaaagattatatacccaaatatcggtactttgtttaaccctaaaagcctattactgacagtcattcgtttcgaggcagtcttaggagtaatccgaaaaccagctgtagataccagtgctaagcacccaaatagaggaggactcgacgatacaaataccctaagatactgtacacttggttgaatcactcttacaatcatcaaaattcgggttattgataaatatgcctggtataaaagggactagggcttccggcgagggttggtaataaggcgattctgtctaaattattcctatgagaatattctgcgcccccgaaagctggtactggtagagagtactgtgttccgatgcagtaccataaagccatgccagttgactctcgatcagaataccacgggctgcgtaaacatcaatctgatcttgggaagagacgtcaaggtcatggtcagccacccagacccagatgttctccaggtaggccgtggaagatgaagtcagatgaagcaaaagagatgcagcaatacaatcttcattgacacttcccgtgttctttggacactgtttgttctggaggttcgaccctacagcaccgccaatgcggatgtgagaatcccacatagcagccgatcccttcactgattgctcaacattctactctataagaatcgcacctgccgtagggctagagactgtgaaaagtagatcttaaatttccactatactaacgtcactagaagcactgaccctaacggtaactcagggatcctctatatctgcaaaattagtaccagttgctatgatctgagactatgcctaacctataatatgtgatccaacaggtatatgcaatatatcataaatcatataaataccgtgtggaatgtatataatagacaaaagattcgcagtataagacaaagcgtaattaagaatcgcagtatcatccatagtcccgtcgcccttggctctaaggttcttaatattaacgatttggtcggctgcgagagtcttatattgaggtcgacgatgagtgaagaggttagagtcaatataggcttatgtccctagtagctgagttagtcgcaaaatagtagggatatcctcaccattagtaaaggatctaactccagatatatcgctgaccattccgaaaccctatgaagctttacggacctcattactaccagcaagaagaattttattctgaatggaatcaatgattgcggtcttgacgttaaagaatccgacattttgcaataacagagaagtcgaattttccgcatgaagtaaggttatgattctattcggggtattggcgatgatggcatcagtcaagatgagagatctaataccttggcctatactcgaaggtcctctggcctatctagattagcatgacttgccaaatgccattcagctattttgtctatgactcactctacccacaattgtgagtccatttgtataagattcaataacgtagtcctgtatggtctacgcccaatcccaatgaacctgaagagcggtgttgcagttcacgaaggtgagctgacttgaagtgaactgttggttaccaaagtaagcactatgcataattaattagaccccattgatattcaaactgcacaagaatgtcattacccaaagttgcctcccacaaacgtaaggtcagctagaaagcctccagatccattctccatgtagattccttattgcgtgttcgacggaacatctgaattgtataccatgtaaaattctatgttttccagcgacgtcccttgcgcaacttgccagtggatagcacagatgtatgccgaggggtcagttggtctgatgtcgattttgaagtttctaacgctgcgcaagaagttgttttgattaatataccactcttcattgtcactgacatagacatcggaggtaatgacgcccaggccaacgaaactggatgcagccaggatggtaggaacttcgaggggctggtggctgtcagtgattaaacagcacaagcatgcagaacaatcgctcagcagcattgctcgaagaaacttacatcacccaaaaactcagtattatagtactgaatgattggcgagctaaccaggtatgttccggcaggaaaccagactgtcgcagggtagatagtacttgatccacagccgaggccgcagcgtccaccgtccgagatagccttgttgatggcctctgtatcgtctgtgacaccatctccgacggctccatactcgcgaacatctctccatacctattttgcgtcaaacttaaggaaattaatgagaggggaagagggcgggtactttataaccagctggagcaaatgcactttttccattttgttccatcgtagccatccagtacttcgaagtactagctcgcttttggattgctccatgggttgtatcattgccaaacacgatgtcatcggtagtaccggtcgataaaaagtcactcagaccattcgaatgtaccaaggcctggcttggggcattggtatccctgcgaccctttccgtacttattgcgaatctgggaagccacgagactgtgatttccagtcggcttgtttggagttgactcggcgacaattcgagctgcgcgggccagctcagtcgggattgaatatgccttgtttccgctggacggggtagctgttgcgtcacggtggatgagatgaggactttcaactgctttaggactatagcccagaggcgtggcagccaatttggagttcttttttgctccctgtgatttatcaaacgccaaattattaaaattggggttcgatgttcgatctttgttgacttttgcgagagctgccaaagcatctttcactatagtcgcggcatcattgctggtaacgttaccatgactccggtggtgaagacttgtatggcggtggtgaatattatgatctgccgatgcgcaagctgcgaagacaaaggcaattgtcaagctgaagatcagacccaccgatcgcagctgatgaaccgccgatctcctgttgagcttcatcttgccagcaacattcagaaactcgatgctgaagggatatgacttttgggctttctgtgagcgagaatccggtcatatgcgattttagtctaggctcactttcgtcggttctcttattctgggggccgaaaaaaagccagaagcaatttccgcgatgcgaccataaatctactagtttgatcgcggacccttcggagatgcccgtgccaagccggccaagacctgccaaaagcgcacaaagtagggtccgatctccactttcagttcttagttccgccctaaagcatgtcgggaccaaacgatctcatcgtcaacctcacaagggccttggctagttgattcggtgtctcagttgcattcctcgccgctatcgttattttcttggcaaatgcgctattgactaccatttcatcgctaccaaaatatgaaacatgttcctacgaaaatgtcggtcgttagcgagtggtcccaatatttaccttcggctagatccttccgaagtgggaaaacaaggtaggccattggtgagaagtatacgctagatggaagcgaatcggggggccaaaatatcctcatgcaacatcatttcatttagtccggtggcgacccgggggcagcagatcttggctaatataattttgataaaacagaacggagaatcatattgccttaatgagctcccagctagacttgatacccaccaagagataatatcctccagtatctctcctgctatgctgggttcgttcagccagaaatgatcaccgtacgcccaactggaggagccctcctttggctccttttgatctccttctgctttatatttaccagtgccaatgcacaagattgcagtgctttgaacacatgcgctactggatgctgcaacaaaggcggatactgcggaatcggtgatgattactgcggttccgactgcgttgcgaattgtgattacgagccagaatgcagtgtctcgaagccctgtgcaagtggatgttgcaacagctatggctattgtggtctgggaccagactgtgagtttctcaatcctctaaaacctagttaccgtgtctttctagagcatatttctgacatgaaatttcagtttgtgccgataaggtttgtgtgggaaactgcgacagtaaggcagagtgcgatcccggcaaatatggtgactatgcggaatcttccaaatgtccattgaatgtctgctgctcgaagttcggcttctgcggcactaccgaagaattttgtggcaagacaaaagtcaagcgcccttcctgtgataaagatggatctctcaatcgagtcgtagggtactacgagggttggagtccttcacgtcgctgtaatacgttctaccccgaataaatccctgtgggcatctacacacacttgaattatgctttcgcgtcgatcgatccagatacattcgagatcgtcgcggccaccgagagtgagaaaaagctgatgacgcgcttgacggatcttaagaaggtcgatcccgatctcaaagtcttcattgccgttggtggctggactttcaatgatcctggagccacccaaactctgttctcggatctcgctgcgtcggaaagcaatcagaagaagttcttcaagtccctccagagtttcatatccatatacgactttgatgggattgatcttgactgggagtatcccgtggcggatgaccgtggcggtcaaaagaaagatttcgacaacttccccaagttcttggccaatttgaagaaatccctcaagtctactggtggccgcgatggagtcagcattacactgcccgcttcttattggtatcttcaacattttgatatcgcaaacctacaaaaacacgtcgacttcttcaacatcatgacctataatatgcatggaaaatgggacttgggcagtgaatgggtttcccctatgctcgactctcataccaacctaacagagattaccaatgctctcgatttgctctggcgaaacgacatcaagtctgataaggtcgtcctgggtcttgcattctacgctcgagtattcactgctgctgacccgagctgcatggagcctggttgtttgtttgtttccggtggaaacgctgggaaatgcagtcaagaagttggcatcttactgaattctgaaattatggacatcatggataagcagtccctacagtccacgctggataaggaggctgccgtgaagattctcaaatttgacgacaaccagtggcttacctacgaaaattcagacacatttaagctgaaagccgactttgcccgaagccaatgccttggtggtgtgatggtgtgggcggtttcccatgatttaccccaaggtagcttttcccgagcccttggagatgccgtgggcagaagtgaagtcccttgtcaacagcggtgaattagcgtcaatggaggtcaaaaagacccatccgcagtgcaagtggacgaattgcttcgacgattgccctagtggatggtcgcgggttcgccgtacagatgacggtgcccgtgaaggcgagcacatgtgggattctaccgcatgtagttttggacagcatacgttctgctgccctcctgatgccgaacttcccaaatgtggatggtatacccataacaatggtaaatgcaattcggagtgtccttctggctacactgagattggatccaacatacaatactgttctaacgactttaacgactaccaagctgcttgttgtacaactgaaactcccagtatgaaactttactccaagtgtgactgggcgggaaaaccacggaaatgcgacgaggaatgccctagtggcaagtccgaggtggctctgtcaactaccggcagtggtggtgtatactgcgacgttacttctttcaaatacacaatgaacggccaagagggcacaagttgggaggaacgcagctactgctgtagtgaggaagacgatgttgaatggagtaaatgcgaatggcgtgatgacattggcctgatgctcgacaaaagctatgttgacggttactgtctccccggctgtccggatgaatacgtgcgtgtcgctattgatcaacacggtggtggttgcaaaggcgacggtggccgagccaaatgctgcttgccaaaatattcaacagtcagcaagagatcatacaccacgcgggaacagagtcttgatgacttggttaaagggttcatggatgatccgagttgtggagcggacgattacaacttgaagagggatctcgcgggctttgaatattctgtgggaaatacctctttgtccgatctgtctggtactcgaactccaacaacacttcaacgccgctcaacaaccaaacagctagatgctatctatactgttgcatacgcccttgctgtgcagtttacagttaatgcagcctacgaagagatctggaaaaaacgtgtgctgccatcatacccacatcttacagtcaaggctattcgcaattacctgactacgtctgaggactgggctgaaggaggtataagttataaactagagaaggttctttgcgccccaagcatcttcgacagcaagtttgcagaaagaagcattgtctcctgcgcatgcgaaacaagcgattgctgcgatgcaaacgatccggattcctgttcggatcttgacggtgatgatgatgattctactgctcttagcaaaagagttttagataagagagcctcgcgaacgttcgatgtcgatttatcagacggtggagcgcatgctacgatcacttcttggacggtattaatcttcaagtcccaatcaacgtatttttagtgctaatcagacgatcagtatatcgtgcgtggcaacattcgaggaaataatcccatcttggatgaaggttatacctacgatgacgctgaggactgcctcaatactcaaatcgctttgatgtcagtttcgatggcgaatatcggaagatatcagggtacgttcttggtgaccttgtttaccctgaaagtttactcaatttactaattaatcaagtcgaacatgtcgttgagttgaacaccgttgcctttttcctgagagatgcagccaatggggtcctcaggtctggtggtgtgatgagactcggtcgaatttcagtgaccttcgttagacaggctctgatggcgccagttcttaccaacccaccagtaatgactggtgccgaccaatccttgactcccatgacccggattatgcatgctttgggtagcctgaacaaccaagctgatttcaaccttttgcttaatcgtttgaacaacttaaaatccagggtatttgatcatttacaattttttttttctggagatgaccaagttacttatcatttcttttctctagctctggctttcaaaaacactcatccttgatgaaaaaatggagaaagcaatctcagccgatgacccgaatcgcgcattgatacatctccgcgagcccctcactattatttcctatctcaaccatctcagaatccagcctgacatgatcgacacttttaacacaattcacgtagaattcggtcgagcagatacgtactgggtgaatgctggacatccaaacccgcagtcgcaagccagatgggatgaatgggttcctgacttattagatagtgccactcagaatgttcgcacgtttgttgaaaattggggggatcagatgtataggttttgggcagtccggactggtgataacgttgcgcaaacgctcgagatcattatgactttgcgaagacaggctaaaactgcgaggattaatccgaatggcctggattgaaaatatcaaatgactagttatatacaagatgtagttagaagaaaaatgaactgaatttatttgagcagtgggacatgcaattcaacctctcatctttcacccatttgtagcaccctccatatctaaagcagttggtggcgtatatactgaattgagtagctcaattcaccgaatcaggaatctctcttgcgactgacttagtgctttattggtggctgtacggccttttccatttgacctgccctgatgccggctccggagctttcaccttgacacgccaaaatgagaggctgcggcctgaatactattaaattggcctaatttataagctttgagggcatccaaaaaaaggatctcttcttgttcggagaaaatcgggattgttttggtggtaaaaggggctcttggaaccgactctgcaggttcttcaaacactgcaactagggaagctccgtgacctgcgtatcttatgcagttttggttcgtagttctaagtattcgtcttacgccactacacagaaagaagaaatagaagtcaaacagattaggcagaattcaacgcaatataataacatttaacgaaaattctgtcttttctataacttttgatattcatataaatcttcctctcttcgtatacgcttcggaacccgcccagatatacgcctgtgggcacagcttttctttgaaagaggtatcctgtcttgttcaataagcagggtactaggtatggctgttgctgttggttcgattcttggtctcttgccaaggacactctcgtcggttagctgattccgctcaaatgttgtatcagggtagtcctcttcctcctcctcattatcgctcatcagatcgaacacttccttttcataactatgaccttgccaagtcgatttgcccgcaaacgactctggtgccccctaagcccccaaggtcactagtagatctcagcatctccagtcagggtctaacggtccctttaatggacagaatagattacctaggtaaattcttggataaacaagatccagaaaacactgaaagagttgaaccaacaaatagaagcttccgaagatattagcatgctggttggcttttgtttctcaaccttagaaaagggaagacttcgctacaacattaagaaaactcaaagctaatcaacagaaagccccaaacaattggcgaggtactgcgcactccgcactccgtacactagggcaaactcaaagattgtcttggtaaactcggttggggtttcaaatgttggcttggcagcacgtgtttggagactcggactttccctcctctcttctccactccctcaaatttcacgcgaacatcagttcaacatggacgagctccaaaatagccttggcacttacccagactggggatatgtcatctatcgcactacctactctgctgaatcggaaactctaatcccagtcgctatcaggtacattgaagcctgtattaagagatcattcctccgagaccacaaagaagatcctacaaataaacccaacgaaatttgcgccaaataccggtcaactattgtgcaagatcccgcggaattcaatggggcgtctctcgaggcaattcgcgctcattttgaagcgtgggtggaatctcaaggcatgcgtgaccgctggaccaaatggcgaatgtgcatgattattgatgaagaatctctgcaaacactgaaaggtacatcagcagaggcccttgaaaatgagagcccataccattccgatgatgagctacgatgtgtaaaggttcttgaagcatttccggaaacagatcagtatgacaccttcccggggtggatgagatgttggacacggtgtctttgggatctctggatgatgatgggagatgctagtgagatgaggcaattatttgacggcattgatgattttccatttgagggggtgtactgcggataattcaaagctgtttcggtctatggcattagagatatgtgattctcaggttgtggaaaatattgttcgacgggcagtcaaataaagaagaaacacatttttcattcattgatcgcgataatatatgattacaacataaggcccactgtgattgcaatccacatgtttaaggtaaacaggagtacgaacagtagctacattcgtcaaagaagatacgggatcggacattgataccgattagttgggaggcttgcaggtttctgtcaaatttaagaactctatccttttttctttgcttggctgttttcacctcgagtaaacgtccaccctccctgtcttcagtagcagtccggccctccaatgtagccctacacaatagtgatgcaccataaacgccatcaagttacacgtcacgcttataagccggtggctccaggaactagccaaagttccccggagcaaagtattgttcctggaggatgtttagctcccagagctggcctatacgttcctgaagtcgatagggcctgtgtataaaactgtctctcaaatcctttgactcgtccttgaaggaagtcgatcccagagacagccccattggcttcaggaatgtacaagctgaccctgggagcttgtggatacacacattgatgaatacaaactcttttgattctccgttcccgggcgctttcccttattattcggtcttatagtccctgtatgtggcaagccgtttcgtgccgccagggaataccttgaaactgctaagccagaggcatgctttcaatgcttcgcaagtgaagggcttccggacaaggttcgctttcagatgtttcataaccccgggtatgttgcgccacttcgatactattcaccttaaagaggaaccactcaaatgcaactggtatgaagtaggcttgctacatcgaatggcttcctagcgctatgcttctgatatacatcacgtgcggagtcgctggccatgctcgaatccgatgcagggacttcaaaaataagaatagatcggctataaatcaacgaagccattgtctcggtatcggaactacctgtgtgaagcagcacaaggatccaaatgttaggtaggagtctgtgataaaagaccgctctttattaattctcgggattggcctgatagcttgggaagtggattctaagtctgtcttcgaaccaacgaagtccctgtacccgactcagcacttaatgttttatatatgctatttcagttttgtgcaatctaatcgggttgcatatatatatacgataaatcacgtaaagtagtgtccaattgtctcttagcagtagcctactcgaactgttggctctcgggtatataatgagccttgtgccctaactctggcttagtcagacttctactttcctcctacctggtcaacctagtacctaggtatacgtctcttcttttcaagccacgataaccagtccgttaatgtgagacccctaggtatggaatgcctaagggaatgctgtatgtaacggaggatcgggaaatagagatagtgatatacgcagtggtatattggaactaatagctgcttctctaaagaagcagcatgcgaggataatatacaggtttgtgggtcatatgacctaaggaggctgtgcaggcagtacgcattactcctgtctagtctatagtcccctacgcacctaggataggtactccacgtactatgataggtattatatttcaggtatcagccttcttagtattggggtcctgataatatccccctccttgtggtatacggtccccgtaggcttagaataggagaagaacaaaggagtagcttagtctattaaaacccatatatctaaaaaacctcgcagtaagggtaaaaaggtatatagggaaaggtatctagcctcaatactccaaaaatatagaaaatgatataatagaagtataaacagagggtatagttgtgagacccctaggtatggaatgcctaagggaatgctgtatgtaatagaggattgggaaatagagatagtgatatacgtagggtatattggaactaatagctgcttctctaaagaagtagtatatgaggataatatataggtttgtgggttatatgacctaaggaggctgtataggtagtacgtattactcctatctagtctacagtcccctatatacctaggataggtactctacgccctataatagtatgagacccctaggtatggaatgcctaagggaatgctgtatgtaatagaggattgggaaatagagatagtgatatacgtagggtatattggaactaatagctgcttctctaaagaagcagtatataaggataatatataggtttatgggttatataacctaaggaggctgtataggtagtatatattactcctatccagcctatagtcccctatatacctaggataggtactctataccctataatagggcttataccttaggtatcagccttcttagtactagggtcctaataatatccccctccttatannnnnnnnnnnnnnnnnnnnnnnnnnnnnnnnnnnnnnnnnnnnnnnnnnnnnnnnnnnnnnnnnnnnnnnnnnnnnnnnnnnnnnnnnnnnnnngttatttactcgcgatttctaggttataaaagtaatctctaactatagtatttacttttagttataacctttactattataattaatcctatagtaaaacctatcttatcgaagttataaatattatctagattaattctatactaaagaatggttttttaaactagattaaactactctctaataatccttaggtctttatatttcgtatacttataattataatatcttaagaatcgggatataagggtagggtactgtttaataaaatatataacctatgttatatgccaagtcgtttaaggaaagagtgcatttgtgtcaaaattctaagtataaggagagaagaagaaaagggaaaactatctacgagggcgttcctccttcttatatccttcctgtttgcttgtttgcttccagtgcaaaagctcgtttgcccttctgagaaggaataagggaagtcgctcctacctagatcgttatataacccccagctaagaatacatttagtccctaaatacaggctttctattattaacgtggttatctaatattctgtcttcttccgctaccttgatctattcctatagttatattagcggtcctggttttgctaggtaggccttatggaattccttgatcttatctggtatattccggaagttacctactagatactattatagatctaggttgtgtcctagctattaaaccctatactataatttctagtagtaagtcctaacgttaaggattttttctacctcctacttattagttttaccgatttatactagtagcggtaggtctagatgctgtcctagtaacagctctgttgttactactttctaaagcttacttagatagaaaatcgggtaaaccttaatagattccggaagtttaaggtaataagaatatcctactttcttaatgatcttataaggactacttgctaaataggagagctttcaactaggctagtcttactgctaatcctttattgttataaatacagaatcgcctatattaaaatccttttcttagcgatatttatttacttattagatctataactgctaagactttttaatctgattttttatctctgtctagatatcctaaaggtaggatagtatatctattacttcttacttattctaggttaaagtctctcggtccttctaatcgaaagatatagtaggtttatagcctctttcgataaagaatagggacttcttagttatatcttaagggagtattaatactataaaatctactattagtaggtattctaactaattgtcctagttctattctacgtagggttataatcgctgtactatatactagttagtaatttcactttatctatttatctaagggtaatatacagtcgataactttctttttatacctaggattcgatagaacttagtctagaattctaagataaattaacctccttaatcagagataattatatttaggattcctataatctaaataatataatctataaataggcgtactatagcttttatatctatttccttctaataaggaattaatactagttgcttacttaaacggtctactactataaatatagtattatacctatagcaatcttttaggaaggatctaaaatctattgtaatatattactatagttgttctagtactagtaggagatatagtagtcttagagtacaatctctctatacctttattcttttataaatcaagtagttatcgatataatacttaatatctgttacctatcctagctaataatatcgttctaatactaatttctttagcttcttaattcctaggtatataattaacggctgttaatatatcttattaagaagccttatacgaagatctcctttattaggaaccttaagttagttcttaaaaagtaatagtctattataaagcgtctactttagattacttccttcgatagctatctatcggaatggtttaaatttagtattttactagttagcttattttacgcggtttataatcttaggatcttctagttcgatcggtaagagctctataggatatatacctttcttaaggtattttttaggaagtatagtaaactatcgactttagtctatatagggtaactccttctaggagagtatattagtaataatattcttctttcctagtcgatacttaataataaagtagaactataagaggaactcgctctactaggcctactgctaatttatctgtcttatagttataaagtattctaaggattaataatctataatgatttcgaaacgctcctttctagagaggccttctagctctagttactactcttataaggtatagataatagctaataactccttatcctatactttatagttaagtttagcggcttatattatttttaagaagaaagctataggatactaaaagttattgttattatagtactgtattaggactactcctaagaccctattcgaggtatctgtttccacttaggtatagagttttagattataatagtgtaggattagagcctcgactaggcttttttttaacttttagaaagtatctttatattatagtgactaatagtagactatatctctttaagttaggtagtagagtggcttagaaatagtactatatccttagataaattgtctgtagaagttatagaatctaaggaaggattagactccctttactattatagatatcttctattactagattatatagatctttttaggatcgatagctattccttctatattaacaataaatcctaagaacttagtcttagttatagagaatttatacttaggtaatataacctatagacctactttctagagttaggagaatacttctcaaatatacctctaatattcctctatagtatcactatagataaggatattatctataaataccatagtatacttatctatatattcctagagtatattatttataaaatactagaaggttattagcctatttattaatctaaagggtataaccttatatttaaaagatctatattatatatagaaagttgtaagatcttctactctaggagttaactagattcagtaaaatccttaatagatatccagctttataaagaacttagctttactagttctttatagtactttattaattagaggtagaggataataatccttctttaaaatactatttagttatcggaaatctatatagaattgtagacctcctttaggcttctttactataaggataggcgaagcgtagggggtagagctaggtataataaatcccttcttaaggttatctataatatactacttagtagcttttaacttattaaataataacttataaagagggtaatatcctggttatatctctgctttaaggataatattgtggtctacccctatataataaggtaggagtttatcggatttttgcttagagaagacttctataaggttatagtattcctataggagagttcttttaatttctttaacctctatatcctagactatcgttaatttaatattaagaatataatcgatttctataagagaagttaagaatactttaactccctttttagtatttatctttatatatagtcgattaaatcctactctgctaataatacttatattaattagtaagagtgtctcccttagttctttttcttaagtctactagactaggatagggggtatcttattattaaggttctatattatcttccgctactccttaacttactagcggctatactaataaatgtaggcttatagatagggcttttaggtttctagatcttattgaggtttattaaagaagtagtcttatctctcaatatttacttagtaatctttgtttattaccttattccttcttagaatctaagtagatattagtatagtaagtttacttactactttatcgaaaagtgttccctattatagctagattattcgataataataacagttaagtagaatgttatattctgtaaactatattcttcctagtattaaattatactatcctaggtctataactaatattagaacttattattagatccttctatcgatatttaatataagtataatagtgtaggtaattaggtatactagttttctattaaatcctctaactaggtacttctaacttagcttatatatatatagactaaatttctttctaagtaatacgataagggtaatattaataaagatagatctgtctgctcttatatctactaatactttaattgaaaaggaacatctattatatattaagtttatattaaaaactaaactatttcctagacttcctaaaagtttctatagattaagggcnnnnnnnnnnnnnnnnnnnnnnnnnnnnnnnnnnnnnnnnnnnnnnnnnnnnnnnnnnnnnnnnnnnnnnnnnnnnnnnnnnnnnnnnnnnnnnnnnnnnnnnnnnnnnnnnnnnnnnnnnnnnnnnnnnnnnnnnnnnnnnnnnnnnnnnnnnnnnnnnnnnnnnnnnnnnnnnnnnnnnnnnnnnnnnnnnnnnnnnnnnnnnnnnnnnnnnnnnnnnnnnnnnnnnnnnnnnnnnnnnnnnnnnnnnnnnnnnnnnnnnnnnnnnnnnnnnnnnnnnnnnnnnnnnnnnnnnnnnnnnnnnnnnnnnnnnnnnnnnnnnnnnnnnnnnnnnnnnnnnnnnnnnnnnnnnnnnnnnnnnnnnnnnnnnnnnnnnnnnnnnnnnnnnnnnnnnnnnnnnnnnnnnnnnnnnnnnnnnnnnnnnnnnnnnnnnnnnnnnnnnnnnnnnnnnnnnnnnnnnnnnnnnnnnnnnnnnnnnnnnnnnnnnnnnnnnnnnnnnnnnnnnnnnnnnnnnnnnnnnnnnnnnnnnnnnnnnnnnnnnnnnnnnnnnnnnnnnnnnnnnnnnnnnnnnnnnnnnnnnnnnnnnnnnnnnnnnnnnnnnnnnnnnnnnnnnnnnnnnnnnnnnnnnnnnnnnnnnnnnnnnnnnnnnnnnnnnnnnnnnnnnnnnnnnnnnnnnnnnnnnnnnnnnnnnnnnnnnnnnnnnnnnnnnnnnnnnnnnnnnnnnnnnnnnnnnnnnnnnnnnnnnnnnnnnnnnnnnnnnnnnnnnnnnnnnnnnnnnnnnnnnnnnnnnnnnnnnnnnnnnnnnnnnnnnnnnnnnnnnnnnnnnnnnnnnnnnnnnnnnnnnnnnnnnnnnnnnnnnnnnnnnnnnnnnnnnnnnnnnnnnnnnnnnnnnnnnnnnnnnnnnnnnnnnnnnnnnnnnnnnnnnnnnnnnnnnnnnnnnnnnnnnnnnnnnnnnnnnnnnnnnnnnnnnnnnnnnnnnnnnnnnnnnnnnnnnnnnnnnnnnnnnnnnnnnnnnnnnnnnnnnnnnnnnnnnnnnnnnnnnnnnnnnnnnnnnnnnnnnnnnnnnnnnnnnnnnnnnnnnnnnnnnnnnnnnnnnnnnnnnnnnnnnnnnnnnnnnnnnnnnnnnnnnnnnnnnnnnnnnnnnnnnnnnnnnnnnnnnnnnnnnnnnnnnnnnnnnnnnnnnnnnnnnnnnnnnnnnnnnnnnnnnnnnnnnnnnnnnnnnnnnnnnnnnnnnnnnnnnnnnnnnnnnnntatcaaaattctaagtataaggagagaagaagaaaagggaaaactatctataagggcgttcctccttcttatatccttcctgtttgcttatttgcttccagtgcaaaagctcgtttgtccttctgagaaggaatgagggaagtcgctcctgcctagatcgtcatatatcctagtatcttcttctcttctttaacctcttatcttacttaatctataagtatatctagttcgtttttttattaaaattctattaatttaatagtacttctattaggataaaactattctagttaggatactactattagttaatagatatatttaaatttagtagtattatattctatatagtatactaagaaattttaatattatatctaccccttccttataggaaatggccttatttttaggtttatatactaactatatttatagaatagtaatagtatattattatcctatactaccctcctctaaggaggataaaactctatatctataggtatagcgctattatatattaggctactagcctataactctactactttacctaataacccctaagcctattaaggaaccactatcttattagtagtactttttctaattataaagctatctaaactataagtataagacccttataggttatactaaatatacttactatactttagtaaagtatagttatatccctataagttaactatattattatagggaggaatctattactaataataatatagcttcctattaaggtttaatctactacctatactactcttaatatattacctatatctacttatatatcctaagtatatattattaagtaaagtattaagcgcttaacctatatagctaataaggctaaaaaggctactactattatagaagctatagaggttatagtagttactaaagttattatagtcctagaaattataaaaaatataggggatatctctaaagttaaagaattctttaatatccttactagtttagtagaggaaagtatagttcctaatataggtatacctagtaatactttatttatccctataaacttaacccctatctcttaggataccctaattatagagtctattttactattctatagtatttttaatactatcctattagtatttaagtctagctaggtatactaaccttacctatacctatatataaatcctattaagtatagggaatatagtactaatttttaatctataattaaagcttcttatattttaaatatatattcttagtccttatcttctttagtatctttataactatatttaacctagctttatagttattaagggccttagtctctttaactatagactacagttcttaggttactttaatattattatagttatactacttaactaagtaggacttattcttcttatcttaataggataggatatattcgatcttatactttacctaattattaatcttaattagtttaggagtattattatta

SEQ ID NO: 73 - DNA, 26200 bp, Penicillium roqueforti
  misc_feature (2691)..(3437): n is a, c, g, or t
  misc_feature (12541)..(13687): n is a, c, g, or t
acgatcaactctaaggatcaactccgaggattaactcagataatcaactccgaggatcaactcagataatcaactccgaggatcaactccaaggatcaactcagaggattaattcagacgattaactcagacgattaactcagacgattaactcagaggaatatcttattagtaaacgaactagcctaagtacctatttaacctgtgacttttgctaatgcttttgcgattcctaccaagtccttttccccgagtgtaattaatgcaaactcggggggaagcgtcttcctgttcctaggaattattagctataccccaaaaccattgatcaaaaatacttactttaaagcccatttttttatattccgcatcctatccttgcaatcgaccggcgttcgcatttccagttgcggatcctccgactcatcatcaagctgcttaatatacgcccaacgcatagggaacttcatccatagccggatcaaccgagcagtttccgcttcttcccatcgtactttcattcgcgagggaccatgcgattgcattcgcgagggaccatgctgttgttctctccctaattctaataactcctggatccgcttttcttcatagacttcgcgctcttccgcaaatgaaggaccatgtcgagatccatatgctacttccctaattacagtccccgcaaagtgactcgggtcacaactttccgatcgtgaggtatcgcgaccagtgccttgttgggtgtcacgaggtcctgagtaccgacctcgtaaagggtgctcctcgatactatggaacacttcctcttcgcctagtatctctgagtctggaagactttgctgtcgatactggctattcccccgtgtaggaggagggcttgaaggaatggcggatgacataccccatatactctcgtcatcacctttattagatggttgctgacgttgaatataactgaagtctcgcgatgttcgcgccctctgtggtgtatgacgagacgaaaagtcgaggtctgaggtgtactctatattccagattgtgtctgcgccttgcccatggcctcggtcgacctggcgcgtttgttgattaggccggcttccggtagtagccgaagctctcagatcacgcctagactgcgtatgtaggcgcgctggtggacccattgactcccgagaagtaccctctgcactagtccatcttaaagatgaagaggtactttgggtttggtccaggacttgagtagtctgagagttatcccttatagcactcatctcacttggagccttcctcttcttcgaagtacttccgcttgacttccatggcaaagactgtgatcggggttggtccagcacagttgtagttggtgagcctcctcctgacattgatgttcgaggaatctggcgacttggggtttcgtctgggacttgtgtagcagaagactgttccctggcagtactccgctcacttagagtcttcgtcttcctggagatactactgcttgattctgacaacagagaccgtcgttcgggaggaagagtactaccctttgacttccatggcaaagaccgtggtcggggttggtccagcacggtcggggtttcgtctaggacttgcgtggcagaagactgttccctagtagtactcatctcactcggagccttcctcttctttgaagtacttccgcttgacttccatggtaaagaccgtgatcggggttggtccagcacagttgtagttggtgagcttcctcctgatattgatgttcgaggaatctggcgacttgtggtttcgtctgggacttgtgtggtagaagactgttccctagtagtactccgctcacttggagtcttcgtcttcctggaggtatcatagattggttcccatggaaggcggcgcccttgatgttgctctggttcctcgtcggttatagggaggtcgccacttgatggctgccgaacgctatgcctccgcggtcgcttttgcatatcgatggtccgagggattttgttaactgatggccatttaataccgcggctctgaggtctctctggttccccagcagtcgaagagatatctagcggttgaacgctctgcctctgaggtagatttggcacattgatagtgcgagtgtaatcgttgattgatggccattgaatgccacgacttcgaggttgctctggtacgctggccgtcatcgtaaggtcccttggggtatccgtctgacttggactacctcccttactgatagtatcaccgatcggccgtggaagaggttgtcttttctgtatttgcgcacccttcgatactagtatttggcttaggggtatcggtcccacttgcagtctcccttgcccgatctcctcgtcagagtcctagaccgccctttctgtaggtgactcggcttcatgatctattattactaccgaatattagtctcgaattaaattccttaagatctcaacgtaccctgaagtactgccttaacccgttgggactgcatatccttgatattccggccagcctatttcaaaggcggtttttgtcacgttaggtccccaattagctaagcaagcaaccccaacttgcgacttcgcaactcagagtatcaactccgagtatcaactcagacgatcaacttagacaatcaactccgagtatcaactcagacgatcaacttagacaatcaactcnnnnnnnnnnnnnnnnnnnnnnnnnnnnnnnnnnnnnnnnnnnnnnnnnnnnnnnnnnnnnnnnnnnnnnnnnnnnnnnnnnnnnnnnnnnnnnnnnnnnnnnnnnnnnnnnnnnnnnnnnnnnnnnnnnnnnnnnnnnnnnnnnnnnnnnnnnnnnnnnnnnnnnnnnnnnnnnnnnnnnnnnnnnnnnnnnnnnnnnnnnnnnnnnnnnnnnnnnnnnnnnnnnnnnnnnnnnnnnnnnnnnnnnnnnnnnnnnnnnnnnnnnnnnnnnnnnnnnnnnnnnnnnnnnnnnnnnnnnnnnnnnnnnnnnnnnnnnnnnnnnnnnnnnnnnnnnnnnnnnnnnnnnnnnnnnnnnnnnnnnnnnnnnnnnnnnnnnnnnnnnnnnnnnnnnnnnnnnnnnnnnnnnnnnnnnnnnnnnnnnnnnnnnnnnnnnnnnnnnnnnnnnnnnnnnnnnnnnnnnnnnnnnnnnnnnnnnnnnnnnnnnnnnnnnnnnnnnnnnnnnnnnnnnnnnnnnnnnnnnnnnnnnnnnnnnnnnnnnnnnnnnnnnnnnnnnnnnnnnnnnnnnnnnnnnnnnnnnnnnnnnnnnnnnnnnnnnnnnnnnnnnnnnnnnnnnnnnnnnnnnnnnnnnnnnnnnnnnnnnnnnnnnnnnnnnnnnnnnnnnnnnnnnnnnnnnnnnnnnnnnnnnnnnnnnnnnnnnnnnnnnnnnnnnnnnnnnnnnnnnnnnnnnnnnnnnnnnnnnnnnnnnnngactatcaactcagactatcaacttagactatcaactcagactatcaactcagaggatcaacttagactatcaactcagagtattaactcagagtattaactcagagtattaactcagagtatcaacttagagtattaactcagacaatcaacttagaggattaactcagacaattaacttagactatcaactcagaggatcaacttagacaatcaactcagaggatcaactcagataatcaactcagacaatcaacttagactatcaactcagaggattaacttagataatcaacttagactagttaactaacgtaattcactaccaagcggcgcacacacccaagtggcgcaccccaaaacacatagtaagaatgataaattccttacctatatctcaactaacaatgttcttatttaatttcattacttcccgatagcaattgataagtatttttagtattatatctctgttttaaataaatcgagaacttgcattgttatggtatcgaaaaatacgtcgctgaacccctagaaatatatatatctcagtttgtcaaagttcctgaaactacataagttagatatatatcatataaaaagaactgggctataaggaaaactttatatagatcactgttgttacgatatcatgttgtaatttatcatttttactatgtgttttggggtgcgccacttgggtgtatgcgccgcttggtagtgaattacgttattaactcagaggatcaactcagacgatcaacttagaggatcaactcagaggattaactcagataattaacttagactatcaacttagacaatcaactcagacaatcaactcagacgatcaactctaaggatcaactccgaggattaactcagataatcaactccgaggatcaactcagataatcaactccgaggatcaactccaaggatcaactcagaggattaattcagacgattaactcagacgattaactcagacgattaactcagaggaatatcttattagtaaacgaactagcctaagtacctatttaacctgtgacttttgctaatgcttttgcgattcctaccaagtccttttccccgagtgtaattaatgcaaactcggggggaagcgtcttcctgttcctaggaattattagctataccccaaaaccattgatcaaaaatacttactttaaagcccatttttttatattccgcatcctatccttgcaatcgaccggcgttcgcatttccagttgcggatcctccgactcatcatcaagctgcttaatatacgcccaacgcatagggaacttcatccatagccggatcaaccgagcagtttccgcttcttcccatcgtactttcattcgcgagggaccatgcgattgcattcgcgagggaccatgctgttgttctctccctaattctaataactcctggatccgcttttcttcatagacttcgcgctcttccgcaaatgaaggaccatgtcgagatccatatgctacttccctaattacagtccccgcaaagtgactcgggtcacaactttccgatcgtgaggtatcgcgaccagtgccttgttgggtgtcacgaggtcctgagtaccgacctcgtaaagggtgctcctcgatactatggaacacttcctcttcgcctagtatctctgagtctggaagactttgctgtcgatactggctattcccccgtgtaggaggagggcttgaaggaatggcggatgacataccccatatactctcgtcatcacctttattagatggttgctgacgttgaatataactgaagtctcgcgatgttcgcgccctctgtggtgtatgacgagacgaaaagtcgaggtctgaggtgtactctatattccagattgtgtctgcgccttgcccatggcctcggtcgacctggcgcgtttgttgattaggccggcttccggtagtagccgaagctctcagatcacgcctagactgcgtatgtaggcgcgctggtggacccattgactcccgagaagtaccctctgcactagtccatcttaaagatgaagaggtactttgggtttggtccaggacttgagtagtctgagagttatcccttatagcactcatctcacttggagccttcctcttcttcgaagtacttccgcttgacttccatggcaaagactgtgatcggggttggtccagcacagttgtagttggtgagcctcctcctgacattgatgttcgaggaatctggcgacttggggtttcgtctgggacttgtgtagcagaagactgttccctggcagtactccgctcacttagagtcttcgtcttcctggagatactactgcttgattctgacaacagagaccgtcgttcgggaggaagagtactaccctttgacttccatggcaaagaccgtggtcggggttggtccagcacggtcggggtttcgtctaggacttgcgtggcagaagactgttccctagtagtactcatctcactcggagccttcctcttctttgaagtacttccgcttgacttccatggtaaagaccgtgatcggggttggtccagcacagttgtagttggtgagcttcctcctgatattgatgttcgaggaatctggcgacttgtggtttcgtctgggacttgtgtggtagaagactgttccctagtagtactccgctcacttggagtcttcgtcttcctggaggtatcatagattggttcccatggaaggcggcgcccttgatgttgctctggttcctcgtcggttatagggaggtcgccacttgatggctgccgaacgctatgcctccgcggtcgcttttgcatatcgatggtccgagggattttgttaactgatggccatttaataccgcggctctgaggtctctctggttccccagcagtcgaagagatatctagcggttgaacgctctgcctctgaggtagatttggcacattgatagtgcgagtgtaatcgttgattgatggccattgaatgccacgacttcgaggttgctctggtacgctggccgtcatcgtaaggtcccttggggtatccgtctgacttggactacctcccttactgatagtatcaccgatcggccgtggaagaggttgtcttttctgtatttgcgcacccttcgatactagtatttggcttaggggtatcggtcccacttgcagtctcccttgcccgatctcctcgtcagagtcctagaccgccctttctgtaggtgactcggcttcatgatctattattactaccgaatattagtctcgaattaaattccttaagatctcaacgtaccctgaagtactgccttaacccgttgggactgcatatccttgatattccggccagcctatttcaaaggcggtttttgtcacgttaggtgtaagatactcctagatttagaaatttcaataaagaaattacttattaaaaatatatattatttattaagggaagcaactttgtggggaatttgggttctagggtttaggaatagttagtataccgtattcagtgattattattcgcttatctttttcatggaaattatatccactctaccataaaatataggggattggtagggttggtgtcagggaagccggaacgggccggaaaggtattccggccgagaacacagcctgcctgataatgtcattgaacgccaagctttagcggttagaaaaataagtgtggatttcaacagctacaagcccgaattcctaccatagaactaccatcacaaatgcctttacgacctagccagcgtacaaggcgtgtacgggaagatacccgagcccgtacagcctttttacgtttaagccagacaaataacctagaatccgaccttgacccattccgcaataccttcctccttaatgatccacgtctaatcgagccttctgaaccatcagactggtcgattatgaacgatcttagggaggcccttgatgctgaaccggagctacgtgagaatctagcagaacccgacatcacttctattctaccactagcacagtataattccccaccgtctttccatccccctcaggcctcagacgatggtttatccgctatctcacctctagtagtcgatgactggcaatctaccccggataatatcattgatccagataccaggccaagttagttctttctagtcactatcgcgatatatccccagggactaaaatataagtagatacaccccagccagagcctacaccaggaccttcccgtgtcccctcgccatcacatgaatctaatactctaggggttgcatctggtcgaccccaattagacccgacaccgctagcccaggcactagtcgaccaactcatccaacatcaaggctgtcaagctcattctctaccttcccgtagcccagagtctgtctctctctcgacggtttcaggctggacctgccctgacgtactctcttccccgagtatcgcccaatatcagtctgggaatccatgggataccttattccctgtcgagctcagacagcaggtctataccggaggtatagatatgagtccgtccctcgatctacatgcagataccgtcgagccagagggtctccaggtctatttcgatattgatagtgccgggggggttgcatcatcacttgccgtcgcgaaagaagggctcaagtggaaggctggccggagcgcagtcagtaatctccagagctcccttcacctcaaccctatcccggtccaatggtttgattctcggcgtcatagtgcgcttcgacccctacatcaagtcccacatctcccgtttggtcgtctcgtgggctttccggaggtagaagtctatctcatttttccacggctctaccacccatcccgcgaccactgggtcatcacagtggatgaatatacgcaatggaccgattctattcttcttcccgcaatccagcagacgtatcctacgtctacggtccagcacctccctagtagcgctgatcatattcggatgaatggtactgctgcacaggtagagggtcgttctggggcccaaactatcactcctacctttacgcaggacttccacttcaatctccacgcagaccgattggatgcactctgggagtgtgttcaaacatatacccagcaagatggacttacccacttttccaactgctctatcctcctaacagctaagaacctgaagcttgtcagccagcgcgctacctgggcccaggcacgtgacgcgtttcttcatcagtggaagcgggctattaacccaacctttctgagagatgatttctacgatatcgccaaggaagtagtaccaagatccccgcaggcgatgactctatgctggcgccgatgctgccttgagagctttagcacgtggctcggccagagtaacgctgccgcagaggattgccaaaattccccgccgacctctcggactgaaggccaggtaaccaacaatgagcaagattaccctaggactcgaagtcggatagtaggccgtccactaagtcctagcgaagatagtctctataacgaaagtgtccatgaggacagcctctatgaggacagccttaatggggacagcctctatgaggaaagcctccatgaagagacccccggttctgattcctacgatccacaccagagtgaacaggatcaaaatcccgctccggagccgtccaaagcccagtggcgccagcaattttatccccagtccctagttcgggatcagtgctcgatgactcttgcaccaaaccgcactagtcctctctggcggcgtggactacgctactgccagttatataatacctcgaaggagatgtttgctgctggtaaccattacctctttggcaatcctcatttcgactcccttactctcgaccctgccatgctacgctcctggcagcatgtcggtggcgcagtcagccactccccaatcacattactccgcggttatattcataccaagattcgcagtcacactgcgcttagggactgctcacagcgctcctatggtacccgtgaggaataccgtgtgactggggctgtattccagaccgtcgatcgactactctgtgcctctggggttgcagatactccaatcattctcccaacggagccattcccattctgggcatatcctacccagttaatgactacctggtggcgctggaatatcaatcgactctgcgttggctttgagatgacatttagccttcgaccgcgtacctttgtgcactgggagcatacccgcgtaatgatgatgtttctcaaatgtcttctctacgtgtatggcggccagggcgggcatcctcagcaaagcctcggtctttggattgaccgtcggagccaaccccgccccggctctgacacagagtttatccaggaaggtatggctcttgggccatcattggcgaagtatggctatggttggcttgcgagtaaggtggactggacggttatggtctttaaacccgcccaccgtgcctatatcgtctttaatacgccaagtatacagtctgtgtatcatcagcgctattgggcagttcggcagtccaaggatgattttttaatcttccatgatgtgctccagcgggttcaagactaccatctcgattctgaccgttctgcgttactccttcagctcctagtggatctctgtctacgtgccttccgccaggatgtctttcgggcccttagtgaacgccagacccagcagcccctcaatgcacactggatcgagaaagctcgggccggcgaggttgcgctcgacatccacgggtttcgccaggttttcgatattggtatcattgaggacgacctccatttcgtcaacaccaaaaattccgctatccgccatctagagaccttattcatccggctctggggctgggacggcgatggtaataatggcgactgggaacgtaagcactgggaatataaaccgtaccgggtcctcttccgccagagctatggtatcatcgcgcagttccatgggatgcaacaggcgcgcgcgtggcgccaacgcctgaaggagacctggattcggtcccactggatcctcccatatcctaactcaagtaccttctggtcccgtggcacgaaacagggtcggctccaggtatggtcaagtgtacatccgggactaggtgagtactacgagcggcgaccccaagggccaccaagccgtatcaccccagagaagctccactatctacctatctcaggctggaaatgtcaacatcctggtcgcatcgcgccgcttgttcagattattcttccacctatcccgtccgatcttgatcattttctcgatctcggtgatagcgtaagcaatacaagcgaggggaatcatctgcataatccgtcacaactaagcattcctcttcctgcaccgggtatacatccagactctgtgcttagtccgttcatccatgctatatctccagagctccactttctccgtcggttcaagaaggaaagcaaacttacgaccgacgagatccaccaagattctaggtggcagcagaggattcttctaaagcatattgaggctatcatccgcgtccatcagcacgagctgaacatgctccagaaacccctagtcgtatggccatcccgcccccgcccgaggctgaccaatggcctctctcagatccatgttacgcctcagcagcttgaggatgaagactcggatactggcaacttctaccaatgtcgtgaacgcctccggcatgagattctacggctacaccaaagggcagggcggacacggcatgagatcgctaggatcgatcgaacggagagaatcatccaggcccaccagccccgagaccttacagatcacgatgaggcttcacagggcccttcggatcaacttaggtgggctaagaagcgaaggcggctcgcccaggaccgactggaacttatttctcgcaagtgtactaggtagtttatgaaaggagaccaggcggtcgatgggactgtatacgcttcatcgcaactgctggatgacaataatagtcgctgcgggggagattatggagaagccatagatgcctgcacgcgttataacttttctccactgtctctcccacagcttccaccgagctcgctggaggattcgcacttcgatatgggggtgtttctaggtgctgaggctgctgcagccgctgtattgccgccgtccagtgactcgttctttgatgaaaccgccggtctgattgaggaggcgtttagggagacgggcggcaagttcttggaggatatattcgatgggagccttgaggatactgggggtatactgcttagagatatttgattagcttgatgttttcctttggctgtatcatcatgaatggctgcacctttttgtcttctaaagatcgcaataccaggattcgatgagtctatgcccgggagaatcgcagttatcgaactggtaaactgtatcaagctttatttattgatagcgtggctgcagttggagtgatgcagcatatagtcgagtgtaagggattcaaggtggattggagatagatagctattctgccgctttgaccgcccaagtagggtagactcagaagaccgcgacaagaggatctactcctttgttctcgcccacgggaaatgttgggtttgatcggcagttggaagttgagttatttcgctcagaatgctgcgacaatagaccccgctttttgtctgtactcacggaaccggaggggtttacccatagcaggagtttaccagcgacaggatacagcatgaatgatggcccccagactctgcaatagtcggtgccttcgaatatcaatatcctgcaatgctagtctataagagagtcagctggataaagtgcacttctccctgtcggcgacctcgagcatcagcatcctacaatatcagtctatagaagagtcagctgtataagttgcgcttcatccccctctgagacattgagtatcaaaccagcggaatgtaatgcaagatcggttaaataaagtacggtttgttttttacctgtggaacctgaggattttgcctgcagctgtgtttggctttctcagatgagcttgctccccaatattggacctnnnnnnnnnnnnnnnnnnnnnnnnnnnnnnnnnnnnnnnnnnnnnnnnnnnnnnnnnnnnnnnnnnnnnnnnnnnnnnnnnnnnnnnnnnnnnnnnnnnnnnnnnnnnnnnnnnnnnnnnnnnnnnnnnnnnnnnnnnnnnnnnnnnnnnnnnnnnnnnnnnnnnnnnnnnnnnnnnnnnnnnnnnnnnnnnnnnnnnnnnnnnnnnnnnnnnnnnnnnnnnnnnnnnnnnnnnnnnnnnnnnnnnnnnnnnnnnnnnnnnnnnnnnnnnnnnnnnnnnnnnnnnnnnnnnnnnnnnnnnnnnnnnnnnnnnnnnnnnnnnnnnnnnnnnnnnnnnnnnnnnnnnnnnnnnnnnnnnnnnnnnnnnnnnnnnnnnnnnnnnnnnnnnnnnnnnnnnnnnnnnnnnnnnnnnnnnnnnnnnnnnnnnnnnnnnnnnnnnnnnnnnnnnnnnnnnnnnnnnnnnnnnnnnnnnnnnnnnnnnnnnnnnnnnnnnnnnnnnnnnnnnnnnnnnnnnnnnnnnnnnnnnnnnnnnnnnnnnnnnnnnnnnnnnnnnnnnnnnnnnnnnnnnnnnnnnnnnnnnnnnnnnnnnnnnnnnnnnnnnnnnnnnnnnnnnnnnnnnnnnnnnnnnnnnnnnnnnnnnnnnnnnnnnnnnnnnnnnnnnnnnnnnnnnnnnnnnnnnnnnnnnnnnnnnnnnnnnnnnnnnnnnnnnnnnnnnnnnnnnnnnnnnnnnnnnnnnnnnnnnnnnnnnnnnnnnnnnnnnnnnnnnnnnnnnnnnnnnnnnnnnnnnnnnnnnnnnnnnnnnnnnnnnnnnnnnnnnnnnnnnnnnnnnnnnnnnnnnnnnnnnnnnnnnnnnnnnnnnnnnnnnnnnnnnnnnnnnnnnnnnnnnnnnnnnnnnnnnnnnnnnnnnnnnnnnnnnnnnnnnnnnnnnnnnnnnnnnnnnnnnnnnnnnnnnnnnnnnnnnnnnnnnnnnnnnnnnnnnnnnnnnnnnnnnnnnnnnnnnnnnnnnnnnnnnnnnnnnnnnnnnnnnnnnnnnnnnnnnnnnnnnnnnnnnnnnnnnnnnnnnnnnnnnnnnnnnnnnnnnnnnnnnnnnnnnnnnnnnnnnnnnnnnnnnnnnnnnnnnnnnnnnnnnnnnnnnnnnnnnnnnnnnntgctggaggtcagagctgggggcgcggtagccactagcattactcgatatgggacagtggacgggcgcagtttcagcctccttgaatgtcttcgccactacttcccctcggcgctcctgaatgcagacctgcgctcctcgagcttgggaaccgacgagatgtgcttacactgcgtcctccgtgtggcattcgatgatccagcgaccctccacgaccagaaaccgttctgcaacccgggctcagggaattcttgccgatcctgctcggaccagggactggcgtgcttccacatcccgccgctgggaagccgcgagctcgcttcagacatgcttcgccgaacccagatatcgaactcggccttctcccacgaacactggcgcttggtctgccgtacaatcgctgagacagttggggtgagcgagcgggagctccgtcaagcgatgctgtgggataatcgctacctccgcccctgtgagcggtccgcaaggcaccccgaataagcctccatcaatcctgttacgtggtaccaatgatcaaagttgaaagctgcacaagaaatgaatcccatagaagaaataaatcactgctgaaattccttatctgcgatatatatcaaagtaaatcacaccctaagcggaaatgaattcctagtcggctatataaaatcataccagtccccggagtcgaaaaaaagagtttgctccatagtataaggcctctagtctctggacctcttggaatgcagcaagaaatgcctgcgctgctcgctggcgccattgctggataaagacctcggctgcatgggtatcggccccaaagagaacgtccagctcggaaatgacactggtattggtccatcggcggcgtccaaccagcgcatcggagatcgcaccaagtccctggaggtggaccgcgcccgggaatgcatatggcacagctccgcggtggacgctagtaaatccaggggtacctctctcggcggggatgagatcgcgatgcgacgcagcgacagcagaccacgtaccggcatcgtgagtatccagctgctcatggtcttcgccaatgccaataaaccatgggaggacggtacgtcggacttgggtggccgggccggttgagccataggggagctccgggcgcgagatgcgcgcatcccctcggtgacagacctggcgctgccacgtgaggccaaaatcggcctcatcagcggcagtccacatcccactggcgatgcgatgaacgacattctggttggagaggccgcgctgctcgacccgttcccaccactgctgcaagagtccctggcggtgcatgccaaggaggagctcggtacaattcgccgggtcctcgtcgctcagggtgaccgcgccctgtatgatgttagcactccgaccccggctgagatagcgggggatattgatatcgaggtgccgaaatgcggtctgggctccggcactggtacttttcgagtaccacgggaccgagatcaggcgccacgcatgatctgggcgaaggagaacataaaaggcatagtatgcgggatcctggcggatgagctgctggatcagaccgtgccacatacaccggagccatcccatgctggtcacactttcttcggcgggattctcgccctgggcccggtggtgctcatacatgtcgaattccaagtcaatcatcgaccagagaccgccggtatgctcacaggggacatcggcgctatgggtacagccaagcagtttcttctcaccaagccagcggaagagaggaatgaccactgagccatcggcatcccataagtctgcgatgggagccgtcggggggggaccgattacccgggtatagatctcgtctgcagtcatgccactcgcggcaaactggtcgatgcgaggcttaggcatttcgactgggtatttaaagaccccatgtgcagcagtgggactaggggtccgagccgcctgttggaaccacttccactgctcacatgtcgggtcactcttgatatgggcaaggctctccaggtgctcgaagatatattgtaagcggctgaagagtttttgattattcggcttactgcggagcccgattccactggcgaggagtcgagcatgggtccgacagaaattctcgggggaaagtgcccagtattgtgtaccacggccagcaattttctcaaagagttgcggcttgattcgtgtagtattcgcatcgtgggactgatcttgatcagcatttaggatatcgctactaggctgtcgctttccctggagaagacaaaggaggtgaggtgtaaagccgctctcgatgcagaggcatgcactggatgatttctgttttggctgggccctagtagccgaatgctcagaatagtcggggtctaggtggtctgcatcgatatcggtatcactataggcatcagagtctccagtatccatatggtcttcactgtcactgtgagcatcagagtctccagtatccatgtggtcttcactgtcactgtgagcatcagaatgtccagggtcgacgtggtcctcggtaggcctgcaggcatcagagtctccagtgtccacgtggtcttcactgtcaccgtgagcatcagagtctccagtatccacgtggtcttcactgtcaccgtgagcatcagaacatccagtgtccatatgatcttcactgtcaccgcgagcatcagaatgtccagggtcgacgtggtcctcggtagtactacgggcatcagaatccctaagcctatccatcaagtctttagcctcactgtaggtatccgaatctccaggctccgagtcgatctccatatccccctcaggcagtggcgcggtctgcctcggagggatctgagtccgggcctcggtgctgcttcgaatgaccaccgatggtgtactcggcggagacaatgcaagactgagaggaggtgtcgaactcctgggcgtaaatcgtcgctcgccggatttcaccatcgcggcggcgtcagtaaggagcccgtcggatccatagtccattccgatgcggtggagcatggtctgcgtgatatgggtttggcggaaattccgataggcgcgggtgagatcaccctgcgtgagcgaccgcgtcttgagctggccgggccgactagtagagagtcgagtgcagagctcgttattggtggcaagcaggaagctatggaaggtcgggggtttaggccgatggagcatcttactgatcccttctgccatggcgagggtagtgatccgttggaagaggcgctggatcatggcttccgtgatgccatctgccttggatccccagacttgatatgcccgagtctgaatcgagcggatgcgcttcgtcgcattctcatgtcgcctcatcgcccgctgcgcagtctcccagtttttgctctcaacgggtgaggagtcgggatcggagatcacatacttgttatggcatcggctatagaaaagggcaagtaaagcctcgtcggtactgagctgcgtgacgagagcggcgaggacctagggtagaatggtgtgagttggcggtgaatcaatgctgggtgggttcatactagctggcagaggtcatggccggcgcggcctggctgcgtttcaatgatggcgagtgtatcttggaggcgactctgggtccagggaccacctagagtaatggtatgattctgaccggtactgtcagtgatgaagcactcctgatcgagtgacagggctggcataattgaggcgtggagtgatttgattgcgaggctgatgtagaattaaaatatatatattagtgatgcgcggttggaatacatttgagcagggcaacagatatgatctttgatcttgggtttctatttcaggtatcctttgagatcaattatgaaaccagccctggatgcaggcttctaagttgaggaaaaagtttctagtatcctttgacattatacaaacttgaatagcctaggaatagaccttggcgatcactcggtctccggtaatgatttctttcttctaacgaactgggaatccaacttgcagagggactcgggattaggaattccgtagcacttctttattagtactggtttctttgacctatatgggtgattttcctctgtgaatcttcgctccacagtaagcctggaagtcatctcccaagttgataaaaaagtaggctgttctactgtgaaccattactcctacccccttttttttttttacctacaatggctcccacattaaggttctctacaataccctaagctataaagatagcagcaaaggccccgaagagagtagtaagggccccgaagagagtagtaagggccctaaagagagtagtaagggtagcgaagagagtagctatagtagtcaactcgacactcctagacctagacttacctctatatatagtgatacagtaagcctaacccgctactatagttactactcgtgatataccgttcgcgggggaaaggactttcccaactccgccggtaccctttatctatcacccaaagctgatgtggtgcctccgctgcctaagcgtgaagctgaatgggttcctgccgaacccaggagaaagctttggggcagccggaacactatgctgctttgaatatacgggttcagtcaagtgcgctgggtgtcgggcggccagtcatctctgtgaagtggtatatgccgagcccgaagcggtcggaggttactaacagattcgataggtcccggaggcgatgcagcaggacgcgttggatttgaccgtccttctgcgctggggagatcggttctggactgagccgcagcccagtgttgcatgggatccatcgttactgcaggccgtttcaacgtgtaccttccggctcgcacaatccttctacgcgtttgtcaaggagcatatgcagcgccatgggctggagaagaaagatggcacgaaactgaaaccggtaggtaaccatccgatatccgtgatcagagactaatagagcccaggaggagagggagttatatgaggacttcatccatcgacgccgattgaccctagcatcgatcgcccagaaagcccggtatccagtcgagagacagtgggacctactgtttttacaaccgggggatgaagaatacatgggctggctacgagcgaaggttacattttatattacgatcgaaacgtgtgtgcaacgcctgcacccggctgagaggtccatcgtttatagctggccgctggataagaagcagttaaacttggatttttgaggggatagattgggcttttggagattgaaatacggtatcggcttgagttcttgcgtgtctgctgcgaataactagaaattgagttactgtttctgatctgtatgaattgggtcttgattcggattacaagtatatattggaaagtagagagtatggagtaataagcttggggaatctcgtgggatcgaatgctctttgcctggatagagcatcgcaacccttgtacccaggcccatcggaaccactgcgccaatgcggcccaaagtccccagttcggggtccaccgtgcccaatgctggaagggggctctgataacttctgccgtccctctggcgattaggatgatatcctggataaggatcaggacgtcgcggatgtcctgaaggaggttctgaaccctcgcagcgactgtgacggccttccgcatgatatctgcggcacggtcgaagagggtggtactcgccacagcggacatggcatcaggcattgtaggagataatataggggaatcaagtaggtagatccgacttgaatctgatctctgcgacggtaattagtcaggctgggtgggaacagaattgaggatgacttaccttgagaggatgagtggacttgaatatttcgacgatgcaccttcgggcgatttgggatgattggctttagggctgaccgcctacgggtagttctgccggccataccccacaaatgaattggtctctccgctttactttgagcctcatgtgtatctctttgccctcagcgaatcccccccccctcaatgacactgaccactaatatccgacagaggatattgataccaagttctaaacctaaaatccatactattccatatagagatatccagaccttgactgtacaaccccaaaatctgctcactttgggctggcgaccaatacaaagaattcgctgccacgcaaatgaaatgattcgccggcgatcaaagcccagcgaattctcccaacttctatctatgccccgattgggcgagatacatcaggctggatggtttctttgactgtatactcggctgggattgtacattttccatttccagcgcgcggtcaccagattcgggcttatggaattggggctaagtcgcatgtctttattgcgttttggaatctaactttggatatggtgccctgccactgtgaggaggcttatttctttatttgatactggtgcaatgctaatactttgggtttacaatttcggcctacagccagtaagtagaagctgctcaagccacttcgaaccatccttgaaacccctgctactccgacttaaagcctaatcaattcctctgtgcaatcaattcctctctgcgatcaattcctctctgcgattaatcctctctgcgattaatcctctctgcgatcatggcatcgcaagttggtgggaagcctccagtaatacctgcagtagcgaagccacctgcagccgctcccctgacaggtcctagagtcttggacctgccaacatggaatgtgaggccagagccggtttgggttttctgtcttgggtgtttctatgtcgaggttactggctttcaaccaaacccagcggaatgctttagcttggaagagactatttgcgtattcgaccacccagtcgccagtgactgcgctgggtgtcgggctgcaaagcaggagtgcattatggtatgtgactgagatgaatggttggactgagctaatgatggatataggtcccaagaggattgcaccaagatgcatacgacttcatccagctactagtgtgggtaaaatcgttctgggataccggtgccaccaagaagcatcaatggcagccggagacactacaagtggtatcagaggcttcaggcgagcttgcatccagcttttatatcattgcgaaaaagcacatcgactactggcatcttgggccgagcgctacagccacggacagggatctatatgataaattcgtctatcgccgctcacagatccgtggaacgcgagtggggaagattagaaaagccgaagacactccggttcgcgtcccgctgtgtgagaagactatgattggtcttgtgccaggggatgtagaatttgcactctggactcgggccaaagttgctatcgtggagacggtccgagcagctgtcgctcagctagagggcgatacgggtaagacattgttggcgggctgggactcgatgatacccacatactatatatagggggaggtagaagaacggtggtatttcgaacttgtttaggtagtgttgtgaaattaaatgcttaaagattatgactccggcgcaaaatcaagtcactcctattatatattgtataaactatgtataatcccgactctgtgacataaggcgtcaaaaacttggaatatatgctgacaccagggcttcttcggcggccttgagcattgatatcctagaatatatattgataccgggatcatttgaataaagtgcgcgttatctcccccctccgagacattgagcatgaaaatcgtggaatgcatactgatactaaggcttttcatgcaaactgcgaccaatcacctgcctcagtaccttcgagtatcaagatcgtcgaatgtatgttaataccagggtcacttaaacagactgcgcgtaatcccctggtacaatcgattataactactgcttcaactatagtaagtactgtccaagtttcggaagaaggcggtctgtggcagaatctccgactcaagaacaaaacatgtcgaatcagcccgcgtaacatcggcccagaacccagcaccaaagctgggttccgaacctatgcttttgcaagtagacttcttagggagttaaatgtaaactgtcaagacctcagcgcgatttagctcggtttggccgattggatgggggtagaaatttgcatgcaagtattcagatgcgcacgacttgacagaagcttggcgcgggaaggctccacctccgcgaccacatcaaacttttgagatattcaagtccccacaacatacttcatagcagggctttagactctagtacctatgaaagtttcaagataatcgaggctgggttgcgggctgtacccagcgtagacaattctcagcaagcattcagcggcaaagcctataccgcattagatactccgtggtagagtatcaattgctaatattatggttgccgcataatgcgtcgccgagtcgcgcgactcgcgccccgctgtaaacaataatcttctgaggcctgcctagatcttctttcttttcccccaacactcctccaagcttactctggcgacagctttccaattgtctcaaggtacaccctatgtccttactactttgtcgccaagtctgaccgattctactgcctcagctattcctatccggctcgcctgaccgctgaagttcaagctgtctcaatggcgttccctttggcgttgacgatagtaagagaatttctccaggcggtattctaagcccaaaaatactaactatcctctagtcgcttttcacgctcctcactactgtgtccgtcgcctattacctcttgaaactgcctgctgccatgccctgctccatggcggagatgctcgctttccttacccgggcgaaggaaatcctgcggggagtactcgaggtgctcactattgcgaagaaggtcctggaggaagtgaaagaggtacttcggatcgccaaggagattacgattatcatcggggagctattggccgctgtcagaggcctctttcactggcgccagtgggcgctatggatactggaggttgggcgttcttggctccagtgggcacaggctattaagcattcttggcttcaatggatacaggtcacaaacgattcctggcttcagtgggcacaacaggttcagcgctcctggctccagtggatgcagactattgagtattcatggcttcgatgggagcaacagctcgagtactcctggctccagagggcacaggctattaggtaccaattgattactaactctcttcttgctattctacgttcttctcgagggagaattataattgtggataactagttacttatcctaaagcccaatcgtgcaatacatactgacaccaaggtcagccgaacagagtgcacagaattctccctatcagcgacatcgagcatcagcatcctgcaatgcgcgcaattctccccgtcggcgacctcaagcatcaacatcttgtaatacatactgacaccaaagttagctgaacaaagtgcacgcaattgcccctatcggcgacctcgagcatcagcatcctgcaatacgcgcgattccccctgtccacacaattcaccccgtcggcgacctcgagcatcagcatcctgcaatgcgcgcgattccccctgtccacacaattctccccgtcggtaacctcaagcatcagcatcctgcaatgcgcgcaattcctcccgtcagcgacctcgagtatcagcatcctgcaatgcgcgcaattcctcccgtccacacaattctccccgtcggtaacctcaagcatcagcatcctgcaatgcgcgcaattcctcccgtcagcgacctcgagtatcagcatcctgcaatgcgcgcaattcctcccgtccacacaattctccccgtcggtaacctcaagcatcagcatcctgcaatgcgcgcaattcctcccgtcagcgacctcgagtatcagcatcctgcaatgcgcgcaattcctcccgtccacacaattctccccgtcggtaacctcaagcatcagcatcctgcaatgcgcgcaattcctcccgtcagcgacctcgagtatcagcatcctgcaatgcgcgcaattcctcccgtccacacaattctccccgtcggtaacctcaagcatcagcatcctgcaatgcgcgcaattcctcccgtcagcgacctcgagtatcagcatcctgcaatgcgcgcaattcctcccgtccacacaattctccccgtcggtaacctcaagcatcagcatcctgcaatgcgcgcaattcctcccgtcagcgacctcgagtatcagcatcctgcaatgcgcgcaattcctcccgtccacacaattctccccgtcggtaacctcaagcatcagcatcctgcaatgcgcgcaattcctcccgtcagcgacctcgagtatcagcatcctgcaatgcgcgcaattcctcccgtccacacaattctccccgtcggtaacctcaagcatcagcatcctgcaatgcgcgcaattcctcccgtcagcgacctcgagtatcagcatcctgcaatgcgcgcaattcctcccgtccacacaattctccccgtcggtaacctcaagcatcagcatcctgcaatgcgcgcaattcctcccgtcagcgacctcgagtatcagcatcctgcaatgcgcgcaattcctcccgtccacacaattctccccgtcggtaacctcaagcatcagcatcctgcaatgcgcgcaattcctcccgtcagcgacctcgagtatcagcatcctgcaatgcgcgcaattcctcccgtccacacaattctccccgtcggtaacctcaagcatcagcatcctgcaaaagagagcagcaagggcagcgaagagagcagccacagtagtcaactcgacactcccagacctggacttacctccatatatagtgatacggcaagcccaacccgctgctgcagtcgctgctcgcgatgtaccgttcgcgggggaaaggactttcccaactccgccggtaccctttatctatcacccaaagctgatgtggtgcctccgctgcctaagcgtgaagctgaatgggttcctgccgaacccaggagaaagctttggggcagccggaacactatgctgctttgaatatacgggttcagtcaagtgcgctgggtgtcgggcggccagtcatctctgtgaagtggtatatgccgagcccgaagcggtcggaggttactaacagattcgataggtcccggaggcgatgcagcaggacgcgttggatttgaccgtccttctgcgctggggagatcggttctggactgagccgcagcccagtgttgcatgggatccatcgttactgcaggccgtttcaacgtgtaccttccggctcgcacaatccttctacgcgtttgtcaaggagcatatgcagcgccatgggctggagaagaaagatggcacgaaactgaaaccggtaggtaaccatccgatatccgtgatcagagactaatagagcccaggaggagagggagttatatgaggacttcatccatcgacgccgattgaccctagcatcgatcgcccagaaagcccggtatccagtcgagagacagtgggacctactgtttttacaaccgggggatgaagaatacatgggctggctacgagcgaaggttacattttatattacgatcgaaacgtgtgtgcaacgcctgcacccggctgagaggtccatcgtttatagctggccgctggataagaagcagttaaacttggatttttgaggggatagattgggcttttggagattgaaatacggtatcggcttgagttcttgcgtgtctgctgcgaataactagaaattgagttactgtttctgatctgtatgaattgggtcttgattcggattacaagtatatattggaaagtagagagtatggagtaataagcttggggaatctcgtgggatcgaatgctctttgcctggatagagcatcgcaacccttgtacccaggcccatcggaaccactgcgccaatgcggcccaaagtccccagttcggggtccaccgtgcccaatgctggaagggggctctgataacttctgccgtccctctggcgattaggatgatatcctggataaggatcaggacgtcgcggatgtcctgaaggaggttctgaaccctcgcagcgactgtgacggccttccgcatgatatctgcggcacggtcgaagagggtggtactcgccacagcggacatggcatcaggcattgtaggagataatataggggaatcaagtaggtagatccgacttgaatctgatctctgcgacggtaattagtcaggctgggtgggaacagaattgaggatgacttaccttgagaggatgagtggacttgaatatttcgacgatgcaccttcgggcgatttgggatgattggctttagggctgaccgcctacgggtagttctgccggccataccccacaaatgaattggtctctccgctttactttgagcctcatgtgtatctctttgccctcagcgaatccccccccc

SEQ ID NO: 74 - DNA, 18224 bp, Penicillium roqueforti
  misc_feature (6267)..(10375): n is a, c, g, or t
acagttatagcagtgggttacgataagcatgcattagcagaaggattggcaattattattagtagcatagtcggcaaaattaagagatacctccttacatttcgaagtgcatacaggttatgatttgcctcaacgcttatagcaatagatgcatgaggtggtactaagacagattcggtctcccaaggcccttaacacaccaccaggaacaactttggcgttcccaggagctagactctagagattctccgcaaacattgttatcaaggctttgatactgccgtgtgattgctacgcacctcagaggagccacaggctacactcctagcggaccataggatttagccgaggcaagtatataaaggactcccatattcaactttcacaactctcaccttaccttcacctacacttcatttactctaagctccaatccactgtctaaccatggtctatttcaattcattcttaccgggcttaccgatgagctaatatattatagccaaatatcagagacctacccaacgagcttttgctatggattatatcgcatttggatggtagtacgatgttcgcccttacaaaattgtgcaaagaccttagttttagactctagcccagtatctagagatataacatcaaattccagaatagcaatctattacacctggccgttaaagataacaatgttgatcttacggcggctttgcttcagcataatactaacatcaatgccttttaccgaggcaaaatacctttaataagggcgtttcaatactcttccaccgcaatacataagctattgctcaatcgtcgagagctagatatcaacatttagaatcaagcgcacaaaactgcgctatggtataccatttactatagaaattattccatggttaagagccttttagagtaacctaaggtcagagtggatattaaatataaatacagccaaacggcgctctacctagcggttttcgctagtaggatagagtttatacatcttctactatcaagaggtagtaaccctaatctataggatgattcaggcgaatcaccgtaggcctaggcacatcgcttctatagacctataataaaaatgattctttccaacgaccctaactccgacttatttcttagaactcaatcatcacaggacgctcagctaccgctatatcaagcagtagcccatggttctatcgccgctatctagcggcttctaaggcgaaaggacctagcgctagacacctaggaccacaaaggttatacgccgatccatctcgccgttaaaagcaatcgccctaaagtggttagtttactcctaagttacccgcatgtaaatgtgaactgcacagacaaatatggaaatacaccgctttagctttctacttactcgtcctactataaataaccgaaaggctgttagcctagaaaaaaatcgacgttaatctgattaggggccgtgggagattcgaaataccgtccatatctctataccacaccgcgaccagattagatactatacttctacaacgactgcttacagtactagagatcgatccgaatctctgcgttacaggtcactctccaatctccattaccgcatcccgcggatacataagcacggttacttgtctactgagtataggaagcttagagatcaatgggaggggcttcatagatccgccaatctatcaagcggctgcatacggctatcacgatatagtcaggctattagtgcaataaggcacacatctaaatatcaataaaagcacgatcgtatcttacaacactgcactctgcattactgcccgtagtagtgacttggagatggtccaggcactattgtatcataatcaaattgatattaaccttcggaataaatattttaaggatccattgatattagcagtcaaggatggtcatttctcaatagttaatgctcttttggcaaacaccagactcaaacgcttcagtttgaagagatcgcttaatctagcaagagacgactgcatccaaagggctattcaaaccagaatagaatccgacagcactcgtcaaacattattaaggcggtctccgaggatgaaatttagtggtctataaaacccatctacacctctcgtgatacaatgcgagatagctgttttcagcgtcacttgacataaactctcagaattattatctatacctccacgcttcgaataagtttattcacaataaagtcacgttcgacttcaacgacttcttgatgtatagcatccaatgcatcaaagttatacttacaaactatcattaggaggtagtttatacaagtctttatttcaaggcttcatctattacgcattttcacattaaattgagtaactcggggtaaacagcagatgaaatcgagcgtcaacagttgaggtaaccgttgaggtaaccgctcactgactcttttaaaggcagtcgaactcaggccggcacggtcatgggtggcataacagcagcctcggtaggactgccgggctataaaagactcttcagtacaatgtctcttgcatttcattccaaggccacaatagaccatcccacttcgccttacccatatgaccggccagctaagagacagtgccgggtttcccacaacccagaagataagaataagttgcaaagccatccacagcaatcttcaaacggcacaatcattaaacccgaggtcggtcataccctcttcgatagcaaacgaacaagatcactaacactacataggttctagtgcgcacacccggttccctaacggcggagttcatgaagcttctacaccacaacgacgccctagctacaccagccctcaaactactcgacttgtacttttgcctatgggaatgctacgtcgtcaagtctgccgaggagatacgacttaaggatgagcagcgacagcttcaatggttaaatgagtggctagcaagcaatagcgacatccttctacaggtctgcgataagcagacattgatactgtaggatcgaaagcgagcagttcaagcactttgtaacggcgtcgtttcagccttgcaagcaagcgatcccaaagccttccatgttaatgggccgtgatgaggtctcggcgttgtcgagcgctcgtgggcgataacgacacctgaatagttctgctatctactgccttctatcccgaatatcatccctctttctagaggcccatacaaccgccggtgatattccgttgggtttggtgacggggtgtaaacatttcacggctgttgatacacccaacgcttagtttagggcatttagtatctggccataattcctcctaatacgtccagaccttatgcaatcaagcatagataaaacctctgctcatcctgcggcattctgtccttcccaacccccgttagatcgccagcttataaacttctgtattctccctatagtacagccttcgacggcgagttttgaaccgaaatgaatgaatcgaacaaaaatggtctgtaccagttgctttcataattatttgtgctaaaattggtagactgtgattttggatcttgaccttcacgccatctggcaagagtgctctggcataccgacaccacctccctgtctcgccaccgactccgaaaattctcggcagattccctcggatgagggtgagcctgcaggagatgagacttcagggtcgtccgtgatcgaatgccttttccatcccacttacgagaagctgtcagccttcaggtagactggtccagaccctctgtccatgtctactcaggctagcgacttgttcctctacatgtcagctttcgctttctctaacgaagtgcactgggtagagactcgactagtcctatttgatcggaaacctggcgagagtataggagagcatctgttcttcctaccccgggttgaaactgccctggggaatctctgtcgggtacgcggacagttgctagacacgatccatgattttggtgcaataggcaatagcttccgactgtctctacagcctcgcatagaacttctacaatactcgagtcaatcgacactttctccgctaggtacgctaccgaccacactctccctggatccggagttttttgtacataaaatattgggtggttacaagtgagaccggtccagaacataggggattgttcgcagacacaaggaatataatctgctgttcatactgtagttctccttcaattaaaacgtcattgtagtgtttctgctttaacaataggaaggataactccagatagccgatccctcactctcctcttgcattgtccggcaaccctgccagattgagtctcgaagggtggttccagtcatcgagtaccctaaccagcctctcccaggataattccaatacctgatcgaaaaagcgcagccgagacagctgcttgtcgtggcgaacctgaagaccatctctctcttttctcaggtgcgtaccagtctccttcaaagcaaggttgtcctgctctagcttctggccatcgatgtgcttggacacgcacgactcccataggcggcgatagagtccaacaagtcgagctgctggaaaggcgaacttgggatcgtcgcgctcgaggtctgctagaacctgcaagatcggttgaaatggctcggtcgccagggtgtgtcttgtttttgtttcctgttgcgaaggggagggctgcaatggtcagcaaaagcgtttgaagccgaatcgtttcacttaccaatgagacatggtcggaagtttcctgtgatttgtctttctcaccaaggatgggcaattcactgggcggctgctctcctccaatttcctggtctttttttcgagctgatttgtgcatccatcttgtccgcaggagaaagtcacggctctgaacaataccatttccatcgatccttggtgtctcttatagaatatgcagacgccggtgtgtatgggctgggttttacaatcaccacaacggtcaaccgaagcagtcaaattctgactggagttgttttacttttcagcgggctgttgacagtcaacttgatcataggatagtgatcaacgagtcggtcagggaaatttgatcgcctcacgatattgagggtcagatatgagcgctcatcggggagatatatatttcaatcggacacctctttccactctcgttgaaagtctcagaaagtcgacaaacggaacattatagaacttacagtaacctaaaaaaaaggtccaaaaagaaagcgaaaaaataacttaatgtatcttcatggtcacaagttagaaaattgagtgttgacaacgttgggccaagcttcaacgggttgacgggtcgatcacccgcacatcctactgtgacctcgctttccgcagtctagacggacagacccacagctcaacacaaccaacacaacactaaagcgaggctaggaaaaaaattccatgatttctagggataaaattgaaggcgcttttcggtgaatcaacgctgagtcgctcacagatgagatgatcacaacacaaatatgagcctgtcattgcggattgaatagtgacggaaaaacggtggtaaggcgaatgtatatgtggcagatggtattcctctcaaaattgtgcgttaggtctgatggcccactttcatcgactgttgaggagaaagtaataccgcgaaagtaagattcgtacccatcaccgaatttgcaattaaatcgctcaacgcgcttgcattctatatctccccgttttaaccacagtcaccgtctctttcataaggattgaagtgcttcgacagatgccgaaataatgggctggagatagccacggaaacgctgtgctgtacctgcggttggccggaggacctttcggtctcactagaatcaatactaccatctctaggctcgcgccgctgaatgttatttctttcctttctaatcgcagttaacttgtattgcctttactaaaatgtctactccctgggcgcataggcactggcatactttcaaactcaggataaagattgtctttctttggcataatagccaaaaagggtctagacctttgaaaagctcagacaagaaactgggtctagtttccaggacaaccatgtgaactgatgcaaccaaggcccacgagctaggttctcgagatcgccaccccctcgcaagattgcaacgctactattacactgacgagaccctggagacgaaaagcacccgaccggccaatcaaacaccacgcgtgaattcagacagatgcaggtagggttctgcgatgcagannnnnnnnnnnnnnnnnnnnnnnnnnnnnnnnnnnnnnnnnnnnnnnnnnnnnnnnnnnnnnnnnnnnnnnnnnnnnnnnnnnnnnnnnnnnnnnnnnnnnnnnnnnnnnnnnnnnnnnnnnnnnnnnnnnnnnnnnnnnnnnnnnnnnnnnnnnnnnnnnnnnnnnnnnnnnnnnnnnnnnnnnnnnnnnnnnnnnnnnnnnnnnnnnnnnnnnnnnnnnnnnnnnnnnnnnnnnnnnnnnnnnnnnnnnnnnnnnnnnnnnnnnnnnnnnnnnnnnnnnnnnnnnnnnnnnnnnnnnnnnnnnnnnnnnnnnnnnnnnnnnnnnnnnnnnnnnnnnnnnnnnnnnnnnnnnnnnnnnnnnnnnnnnnnnnnnnnnnnnnnnnnnnnnnnnnnnnnnnnnnnnnnnnnnnnnnnnnnnnnnnnnnnnnnnnnnnnnnnnnnnnnnnnnnnnnnnnnnnnnnnnnnnnnnnnnnnnnnnnnnnnnnnnnnnnnnnnnnnnnnnnnnnnnnnnnnnnnnnnnnnnnnnnnnnnnnnnnnnnnnnnnnnnnnnnnnnnnnnnnnnnnnnnnnnnnnnnnnnnnnnnnnnnnnnnnnnnnnnnnnnnnnnnnnnnnnnnnnnnnnnnnnnnnnnnnnnnnnnnnnnnnnnnnnnnnnnnnnnnnnnnnnnnnnnnnnnnnnnnnnnnnnnnnnnnnnnnnnnnnnnnnnnnnnnnnnnnnnnnnnnnnnnnnnnnnnnnnnnnnnnnnnnnnnnnnnnnnnnnnnnnnnnnnnnnnnnnnnnnnnnnnnnnnnnnnnnnnnnnnnnnnnnnnnnnnnnnnnnnnnnnnnnnnnnnnnnnnnnnnnnnnnnnnnnnnnnnnnnnnnnnnnnnnnnnnnnnnnnnnnnnnnnnnnnnnnnnnnnnnnnnnnnnnnnnnnnnnnnnnnnnnnnnnnnnnnnnnnnnnnnnnnnnnnnnnnnnnnnnnnnnnnnnnnnnnnnnnnnnnnnnnnnnnnnnnnnnnnnnnnnnnnnnnnnnnnnnnnnnnnnnnnnnnnnnnnnnnnnnnnnnnnnnnnnnnnnnnnnnnnnnnnnnnnnnnnnnnnnnnnnnnnnnnnnnnnnnnnnnnnnnnnnnnnnnnnnnnnnnnnnnnnnnnnnnnnnnnnnnnnnnnnnnnnnnnnnnnnnnnnnnnnnnnnnnnnnnnnnnnnnnnnnnnnnnnnnnnnnnnnnnnnnnnnnnnnnnnnnnnnnnnnnnnnnnnnnnnnnnnnnnnnnnnnnnnnnnnnnnnnnnnnnnnnnnnnnnnnnnnnnnnnnnnnnnnnnnnnnnnnnnnnnnnnnnnnnnnnnnnnnnnnnnnnnnnnnnnnnnnnnnnnnnnnnnnnnnnnnnnnnnnnnnnnnnnnnnnnnnnnnnnnnnnnnnnnnnnnnnnnnnnnnnnnnnnnnnnnnnnnnnnnnnnnnnnnnnnnnnnnnnnnnnnnnnnnnnnnnnnnnnnnnnnnnnnnnnnnnnnnnnnnnnnnnnnnnnnnnnnnnnnnnnnnnnnnnnnnnnnnnnnnnnnnnnnnnnnnnnnnnnnnnnnnnnnnnnnnnnnnnnnnnnnnnnnnnnnnnnnnnnnnnnnnnnnnnnnnnnnnnnnnnnnnnnnnnnnnnnnnnnnnnnnnnnnnnnnnnnnnnnnnnnnnnnnnnnnnnnnnnnnnnnnnnnnnnnnnnnnnnnnnnnnnnnnnnnnnnnnnnnnnnnnnnnnnnnnnnnnnnnnnnnnnnnnnnnnnnnnnnnnnnnnnnnnnnnnnnnnnnnnnnnnnnnnnnnnnnnnnnnnnnnnnnnnnnnnnnnnnnnnnnnnnnnnnnnnnnnnnnnnnnnnnnnnnnnnnnnnnnnnnnnnnnnnnnnnnnnnnnnnnnnnnnnnnnnnnnnnnnnnnnnnnnnnnnnnnnnnnnnnnnnnnnnnnnnnnnnnnnnnnnnnnnnnnnnnnnnnnnnnnnnnnnnnnnnnnnnnnnnnnnnnnnnnnnnnnnnnnnnnnnnnnnnnnnnnnnnnnnnnnnnnnnnnnnnnnnnnnnnnnnnnnnnnnnnnnnnnnnnnnnnnnnnnnnnnnnnnnnnnnnnnnnnnnnnnnnnnnnnnnnnnnnnnnnnnnnnnnnnnnnnnnnnnnnnnnnnnnnnnnnnnnnnnnnnnnnnnnnnnnnnnnnnnnnnnnnnnnnnnnnnnnnnnnnnnnnnnnnnnnnnnnnnnnnnnnnnnnnnnnnnnnnnnnnnnnnnnnnnnnnnnnnnnnnnnnnnnnnnnnnnnnnnnnnnnnnnnnnnnnnnnnnnnnnnnnnnnnnnnnnnnnnnnnnnnnnnnnnnnnnnnnnnnnnnnnnnnnnnnnnnnnnnnnnnnnnnnnnnnnnnnnnnnnnnnnnnnnnnnnnnnnnnnnnnnnnnnnnnnnnnnnnnnnnnnnnnnnnnnnnnnnnnnnnnnnnnnnnnnnnnnnnnnnnnnnnnnnnnnnnnnnnnnnnnnnnnnnnnnnnnnnnnnnnnnnnnnnnnnnnnnnnnnnnnnnnnnnnnnnnnnnnnnnnnnnnnnnnnnnnnnnnnnnnnnnnnnnnnnnnnnnnnnnnnnnnnnnnnnnnnnnnnnnnnnnnnnnnnnnnnnnnnnnnnnnnnnnnnnnnnnnnnnnnnnnnnnnnnnnnnnnnnnnnnnnnnnnnnnnnnnnnnnnnnnnnnnnnnnnnnnnnnnnnnnnnnnnnnnnnnnnnnnnnnnnnnnnnnnnnnnnnnnnnnnnnnnnnnnnnnnnnnnnnnnnnnnnnnnnnnnnnnnnnnnnnnnnnnnnnnnnnnnnnnnnnnnnnnnnnnnnnnnnnnnnnnnnnnnnnnnnnnnnnnnnnnnnnnnnnnnnnnnnnnnnnnnnnnnnnnnnnnnnnnnnnnnnnnnnnnnnnnnnnnnnnnnnnnnnnnnnnnnnnnnnnnnnnnnnnnnnnnnnnnnnnnnnnnnnnnnnnnnnnnnnnnnnnnnnnnnnnnnnnnnnnnnnnnnnnnnnnnnnnnnnnnnnnnnnnnnnnnnnnnnnnnnnnnnnnnnnnnnnnnnnnnnnnnnnnnnnnnnnnnnnnnnnnnnnnnnnnnnnnnnnnnnnnnnnnnnnnnnnnnnnnnnnnnnnnnnnnnnnnnnnnnnnnnnnnnnnnnnnnnnnnnnnnnnnnnnnnnnnnnnnnnnnnnnnnnnnnnnnnnnnnnnnnnnnnnnnnnnnnnnnnnnnnnnnnnnnnnnnnnnnnnnnnnnnnnnnnnnnnnnnnnnnnnnnnnnnnnnnnnnnnnnnnnnnnnnnnnnnnnnnnnnnnnnnnnnnnnnnnnnnnnnnnnnnnnnnnnnnnnnnnnnnnnnnnnnnnnnnnnnnnnnnnnnnnnnnnnnnnnnnnnnnnnnnnnnnnnnnnnnnnnnnnnnnnnnnnnnnnnnnnnnnnnnnnnnnnnnnnnnnnnnnnnnnnnnnnnnnnnnnnnnnnnnnnnnnnnnnnnnnnnnnnnnnnnnnnnnnnnnnnnnnnnnnnnnnnnnnnnnnnnnnnnnnnnnnnnnnnnnnnnnnnnnnnnnnnnnnnnnnnnnnnnnnnnnnnnnnnnnnnnnnnnnnnnnnnnnnnnnnnnnnnnnnnnnnnnnnnnnnnnnnnnnnnnnnnnnnnnnnnnnnnnnnnnnnnnnnnnnnnnnnnnnnnnnnnnnnnnnnnnnnnnnnnnnnnnnnnnnnnnnnnnnnnnnnnnnnnnnnnnnnnnnnnnnnnnnnnnnnnnnnnnnnnnnnnnnnnnnnnnnnnnnnnnnnnnnnnnnnnnnnnnnnnnnnnnnnnnnnnnnnnnnnnnnnnnnnnnnnnnnnnnnnnnnnnnnnnnnnnnnnnnnnnnnnnnnnnnnnnnnnnnnnnnnnnnnnnnnnnnnnnnnnnnnnnnnnnnnnnnnnnnnnnnnnnnnnnnnnnnnnnnnnnnnnnnnnnnnnnnnnnnnnnnnnnnnnnnnnnnnnnnnnnnnnnnnnnnnnnnnnnnnnnnnnnnnnnnnnnnnnnnnnnnnnnnnnnnnnnnnnnnnnnnnnnnnnnnnnnnnnnnnnnnnnnnnnnnnnnnnnnnnnnnnnnnnnnnnnnnnnnnnnnnnnnnnnnnnnnnnnnnnnnnnnnnnnnnnnnnnnnnnnnnnnnnnnnnnnnnnnnnnnnnntgcttctccccccccccggggggggggggggggggggggtgttcgaagccagatatcaagctttgaaatcactccattgggtgcaaaaggtactaaaccggcagctccgaagctatttctagtcgtttccgatttgaaggcttcaattcgtgcttctaggtatgccggaaggaaatcatctttatcgatatgatttcctactccgcatttttgtttcaactagccggctataggacttttttaacaccgcgaaatagctaatatcaaaaggctgtaaaagatgggatgaatgcggaggcatatagattggtataatactattttactcacaaatttcatcaaatttcgaggttaaatgaccaccgtatccgtcgagtattaaaagtcgatacctccccttcggaagtgaagaagtcgaaggaataaagagtttttgaagctatcgaattccaattttatcggaggtccaactgttcggactaagtttaaatcgctaatcatccggaaggccgtaggtctaagattcaataaagactttgcctttcaaaatcatatatagagtaagtacctaaccggaagcattcgtacactcgattaccgttatctacttatgatttctaggttataaaactagtcgccgactgtagtatttactccttgtaataaccttcgcggttactattatcctattgcgaaatcggtcttattaaagttataaatgttattagggtcgatcctaaattaaaggatggttttttgaataagtttaaaatactccctaataattttcgggtctttatatttcgtacgttcgtagttataccgttttgagaattaggaggaaagaagagggtgccgttttataaattttgtaacctaattttcgccgaccgaaataaccggggtggttccacattgttgaagaagaagatccgccatttctcgaatggtagagggccggggggctgctccacgagaatctatagagagtatctatttttgaagagattcctcttcaattctagttatattagatgaattggcgcgagaaatcgtgtggtgttggtagccgcgtagtcggtcttggagggttgaacgtggtatgttaaaacggcgcgccacttcacgaattgaagagatttcttgattcttaaaagcctcggtagctaataagattctaccctcttgctctactaaatttttagagcttcgggagtgaattggtggcatggtgggtggttgaattgactaagtgctaattcatggacgcgttttgggtggtgtggccggctcggtagtgaaatacgttactgttgtgatggtaaaactcagtatactcagtatttagtcacctgcgtctgcatagtctcttatatataagagacaccaaggtctgatggaaacggtactacccaggcctttgactttctcctgtgggcaaaatggatgccccaaaccgctcgacaggccaggaaaatgaaggagataagcagcccagtgaattgccaattcttaatgcccgtcctaagaaaaagatataaatataaggcggtcagaatttactatgggcagaatcccactctggcgcaggcggctatagactgcacgacccctgagctttgtcctcaacaagacaatatgggcttttcactaccgccagagttgacatccattattttggagtacatttcccacgacgacctccatttagccaaatatgcaacaatcagtcgcgactggcaggcgatcatcgagagcaaaacattttcatccctcaaaatcaacacccccaagcggttagcagaattcaatgagctatcatgggaccgaagaaggagctatgttcgaaaaatcgatttgattattcaactggagtcatactatgatgatgacgacgcgttcacgcgctacgaaaatgaaggggagatgcaacgaaacaacaagattttcaccacatcgatccactcacttttcattactctggccaaatggccagcaaaagaagaagccgaatttagtctttcgattgaggcccggtcccccgatgatcttctaggtcaaacccctgaggcaaagagggagcgggaaaagcggatagaagaatcttacccaagcaatgatttccaggataagagattcgaaagatcataccttcaattcaatgaggaggtcgttggtgtcaaatgcccggccgtccccacaatcacttcccttgaaatcatgggagcgataaatagaaggaaaattgaaccagcttcttgttctttcatcgtgtcgaagtttcctcgactataccgcctggtgctttatttgaatgattcttgcaaatgggacccggaactgagaaaacgccatagaaacggtatgctacataacaatgcccggtagggtatgtgctaatcggaaatctagatttcgcggattctattctactatggcctgccagtatacggcagctccaccttgacttctgctatgtggcccctttcgatcaaaactattccccagcggcttcaactgtgaaaggaaaaacagacccgctaagctcgagattacgggagttctcgcaacaattgaaagaaatgggcggggcccaatgtgtgcttggaaaagaagtattctggcccacagatgaacagaatcacaatctccagcttcccttttggccccattttaccgatctgtggttaggatacgagccggtgactccaagtggaaactggatgttcgcaaaggaagaacctcaagaatctgaagatgaggatgattatgactcgagtgacccaggctcagactatagtgagatggatgataccgataaagattggattgccccggaggaccgtatgggcaaaatattccgaactaagcccattcacgagttgttcaatgcgtattatctctcagctgccaatgccgctctttgcatgcccaagctggataatatgtttttggaggtgacgaacggctggaatcgacacaagttttggtacagggtgagggatggagtagcgaatgcgacctggtctagtggtgatgatccgaaagcattcgagccaagcgatgaagtcttacaactctggaaacaggttgcttccgcgcgtactggaggtgatcttggagttgaatttgaccttctctgaggtagaagtttcattcgatcctgcaaagcgtttacaccgacatcaatatctgcaagtcactttaggaacaaagtggctctataacgaggatgaatggtggcaatctgtgcttaatcccttgacttcttcccgatgatcatgctgcaattgacaacccacaaagagcctgcgctgtaacccggtaccattcacaaatcaataagaatatggagtgaacgctatatatactttcaatctggcttgtattgtatataatattattatcttacaagaaagaattcatattcgaatattgccagtatcccaaacttaagctattgcgccagtacaataaggtaaatctaagacgagacaccgatgcagtaagcttcgttcaaccagaaactgttttcaaagaacattattagtattccacccaagtgaaccagaagggttcaacaacttacttttcgcaaacattgttcaaagccggattccaggtatctatgcgaatagttaatgtcgagcttcaacattattccgtaaatggagtctactcacaaagctgatcaactgtgatattgttacgagaagcgaacacttcgcatccatcaccgtgctgagccacatcgtatgcgttgcattcagagggaattcctgcctgggttggtgctggtggcgtcatagttgctcgggtagaggtagtcaccgcagtagagtgggtcgttatagcagtggtgggggctttcacacagtatgcttcatctacccaaaggccggcgcagttttctgtgattctgtgtgagtacaaggtacttatgtagtcggcagggatagaggatgattcgagaatatttacctccgacagccggattccatgcgttgaactgggcaagtgtgatgctatatgctgatgcaatcgccgtgcaagagtcgtttgtctgagccacgtaccactccaggcaatgggcaacaatgccagactgcgtcggggcagggggggccccggtggaagaagttgcggaagtgctagatgaagtggtgctcatgttatagctgacggtagaccagccatgtcccattacacaatactagacatattcgtataagctctgtttcggtttgacggccatgacgttgtttcttaccggggtattcatccaaaggttagtgcaatcagaccctaaaaatatgtaagaagcaaagaagacacaaccttcactgatgcaacataccaacacttggattccattcatacagtgacgtgaaaggaatgtcgtatgaccggcaaattgagtcacagtcatcgcctgtagtcaggtcctcctgatttagtattttatcgctgactcgtgggtcgacgtggactgaccgtctacagtttcataccaatcgagacattcagttgtagaattagccggggcatcagtcggaactgaagcccaaaccatcgtggaggttgaggccactggatagaagaagaatataagtatggtgtttgactcttttcgttgcaaagaaaaagactcacaagtttggttgtagaatgaaccacagtatcgtgtctcatttgtcagcttgcaattataaattgtgtagttctgcccgttcaagatactagggttccatagcaggaagtttgtcacactgacaccaaatatggacgccgcttcccaacatccaagcgcacccatgttgttattgaaagtggcaaaacatccgtccaaagagcccgaggccagtggatatgatgaagttgtcgtagttaggttgtaaacgggccgagtcgccgtgggaagattggcccaagttatggctggatcagctgtgaggcttgcgtacttggttgtggttgtggcatatccggagtaggtggctatatcaccgacagcctgtacacaataggagtagtctacggaacggaaatgagcccatccagaaacacaagaggaaggaaactagggaacacttaccgagaaagaggtttgtgcagttcgcgttgagttcagggttgaggaactcaaagtcatccagactaatcccattctggacagtgatcgaggcgcaattgtctagatcattagcaatgctcatagtgaagcgcaagataacgcaccattattcccaacactataccatttcgcacacttggcattagatccatcgacggcgttggtaggaatggaaacagcagttgcagtggtagaagcttcgaaagatgtactcggcttaacatatcccacattattgcccacacaaatcacatggtcaatcttggtgggccaattagcacagacaggatcgattgttggattccacgaaagaagctgtgtgagcgtaatcttatgagcacgtgaaacactgatgcaggtatcatttcgtcggaccaggtagggctgacaagttgcctgcacacacaggctcgtaaggtttcctggccaatttgtacagccaccaagtagtccattgaccattaaaagctgatcagttgcaaccgagtttgcctctgcaaattcatcacaagtgctgccagttggaacaggcacatatgatcctgtgcatgttaaagttgtagaagtgttgctgaccatagttcttttgatcaaggaaatatttagtcagtgaagccttactctatcaaggaggggtgcatacttggaattactgagaaatacgggcgtaggctcagccaacggcggtactgtgacaccacacgaagatgcagaggagaggtattggctagcaagccggtcaatccaccccaccgcattatcgagctgtgctctcataatgcccagaccgcaattcccgcatggatcgctttcgggctcaccggtggtgccgttcacaggcgaaaggtaacaaaatgcaggagggttggcgctgtatattcataagcaaagatatatcttgcaattggaggcaaccaacgcactcatcttgcatgcaggttacattgtagttaacaaaaaaaggatcaaccagcccgattggcttgatcgagattccttcaatattatagatatcatccttgactccagttccatagacataggaggtaccattgacgggctcgtcggtgtaaacatcatttgcacatgaggtcaagaccttcgatcggaaactggtgattgaatcgaaacacgctatagtgcacagagccgtgatattctctgcgctgagtccgctttgaaagtcggaatctcgaatgatatccgaacaatctacggtgctagctaatgcagcagcacaatcacttgaaaacatagtcaagtcggagatattgaagaatcctgttggtacagacattgtcgcggtgtctgccagcagcatatttgtgtggggagttgctacggtcgtcgctgcttcaagtaaagttgtagaagaaagcgcatctcggcgatggtgagccctttgatgcgcagcaatgtggtcgtggggacttgcgacgacaaatggtatacaaatggggagaagacccaatccaagtacttgacaccaaagtggtgtcatgaagagccgcatagtataccaagtgatgggaatgaaggagagttgggagacatatgctggctcaatatagcaaagaaagagggaaaacgtatctttcgctccatcgaacattctaatttcctcgtttaaccatgctcgcctgtggatcccacggacctacagatttctccgtcactagatacgatattttactccctaagctccattcaccgcgctgtgtagcgtgaacatcaagaatccgctgtttcgcaatcttaagtcagttgatacgacactgcgtttgttggggccgaggagccggatggtgattggtatccgactttggctggtaaactaattggtttcaagatccttgattactggttttagccccattcaattctacaaagtaaagacactacataaatgactccactagtggctccacacttgtgtcgcagttgcaagaaggtccacatgaatctgctgcggtgttctggcttttttaacatgactgcgcgctctttgtttttattttattttaaatcgctagcaatgagatgtacaatgtattgcatgcagggtactcaaccacgggaagcaaacagcatgattatatgtataggatttgtgggcctcggcaacgacggaagaccttgcccatcaggggtagtagaaaatattacctttcaacggacccttcataatgcatttctcggttcatgtccgaagggcggaattcatacaacagatccgtatggaaaaaaagccaaggaggccaagcaaacttggcccccgataaggatgaaaatcaagagaaaacgtaggcttatccttattggcgtgtggctggctttgggggccaaaatactactaactatatccactctcgcaatctattccgcttcacactaatccctcaaagaatccgtggacgttggcccactttttagttcttcgtttacattaatatcacgcaataaaaaatggttcggctgctagcttgctatcgatggattgtatctgccaccgattgtcctgtctcgatcaagaatcaagagacagtggggcaggcaaatctcgggaatggatgctgcggacggagtcgcagtcggggtgaccgttagtctaacgctactgtaattgcgataacttgaatctatttagccccgagagcaaagacaactcgccctctcttctatataggaaatcatagagcctaagtacatataaaa

SEQ ID NO: 75 - DNA, 14607 bp, Penicillium roqueforti
  misc_feature (1549)..(7460): n is a, c, g, or t
taccagcactccatctaccagcactccatctaccagcacttcatctactactactacgaaagatagccatctcactatcgtcactgttgcttctgtcactagcacttctactagtattgtttgggtcacagtgtagatagtggaggttacacacacacacacacacacaatttattaacgcccggccactaagcggaaagggcaactatctctgatctactatacatgtcataatagatatagtactgtgtctcctcaaagcccatacaaaaagccttgcaatatatgtcatctcagatgtccgtattgcagcggatcctcgtgggttagtaattttgttagtagactggcttgaaggcgcttctccaagtgttcaacatcctattttcggcagctgaagcgcgtctaccatctgtaaggcgaggtggttggtgggtcagatcggcgaaagggggtgatttatgttcgttggcatggttaggtggcctcgagtcggcccgtggcgatggcgaatcgtattgaggcccgtaccgcctctaagtttggcgtccacttctgatcatcggaaggcgactttcctcctagaaagaaggatatatttctcggtgagtgttggtacattgtagtagttccgtccagtgcgccgtccatttttgacatcgaaataggaagtgctccacggtctctctcgcttgtccacacgcacactggtccgtgtctgctacgttgattcgatagagatatccattgagtcttgccagccagcacgctcgcttctttccacgataatcggtcatatagctgccgggtgtcaagtattgatttgtattactaagttgggcacgcttgataatacattgtagaggcggcagcatgtctacctacatagaccctctccattgcatccccttcgatcctcatccgcatccttcacggggcacagccagttccgcaagtcaataccagtttgcaccttaagcctacttccatagcggccttgaagtctccatcctcgaagccatcttcaaaatcctattctctcagtagaccgacacgcgcgtccgtcctctcgagccatatagaaagtgtcgtatctgcagtccgcccacccagtcttccgtcgcttccattatatgctgcgccccgcggattgtcaaatccatttcgcgctaccttgcaagatctctttgacaaggccgaccatgtctcgcaggagtttgcccagttgtatcctctctgtacacagagcagccaagcaacacagtgttgtccctcccaccaaccaaactacctcgtcgttctctgtgtggattcaaggatgctgggtcgtgtcgtgtcgttcgtggttttgcttttggctctgtcgtttgtgtatcctcagacccagcgatatcctcctttcaacagagcagcccgagagcaccccaagggtgtcctatcccacgaccctagtgtccactgattgtaggatcggtttcgcagtcgtgtgtcgggtggttttcaaagtgttcccttgtcgcctgtgcgtgggggcagggcccccgacccnnnnnnnnnnnnnnnnnnnnnnnnnnnnnnnnnnnnnnnnnnnnnnnnnnnnnnnnnnnnnnnnnnnnnnnnnnnnnnnnnnnnnnnnnnnnnnnnnnnnnnnnnnnnnnnnnnnnnnnnnnnnnnnnnnnnnnnnnnnnnnnnnnnnnnnnnnnnnnnnnnnnnnnnnnnnnnnnnnnnnnnnnnnnnnnnnnnnnnnnnnnnnnnnnnnnnnnnnnnnnnnnnnnnnnnnnnnnnnnnnnnnnnnnnnnnnnnnnnnnnnnnnnnnnnnnnnnnnnnnnnnnnnnnnnnnnnnnnnnnnnnnnnnnnnnnnnnnnnnnnnnnnnnnnnnnnnnnnnnnnnnnnnnnnnnnnnnnnnnnnnnnnnnnnnnnnnnnnnnnnnnnnnnnnnnnnnnnnnnnnnnnnnnnnnnnnnnnnnnnnnnnnnnnnnnnnnnnnnnnnnnnnnnnnnnnnnnnnnnnnnnnnnnnnnnnnnnnnnnnnnnnnnnnnnnnnnnnnnnnnnnnnnnnnnnnnnnnnnnnnnnnnnnnnnnnnnnnnnnnnnnnnnnnnnnnnnnnnnnnnnnnnnnnnnnnnnnnnnnnnnnnnnnnnnnnnnnnnnnnnnnnnnnnnnnnnnnnnnnnnnnnnnnnnnnnnnnnnnnnnnnnnnnnnnnnnnnnnnnnnnnnnnnnnnnnnnnnnnnnnnnnnnnnnnnnnnnnnnnnnnnnnnnnnnnnnnnnnnnnnnnnnnnnnnnnnnnnnnnnnnnnnnnnnnnnnnnnnnnnnnnnnnnnnnnnnnnnnnnnnnnnnnnnnnnnnnnnnnnnnnnnnnnnnnnnnnnnnnnnnnnnnnnnnnnnnnnnnnnnnnnnnnnnnnnnnnnnnnnnnnnnnnnnnnnnnnnnnnnnnnnnnnnnnnnnnnnnnnnnnnnnnnnnnnnnnnnnnnnnnnnnnnnnnnnnnnnnnnnnnnnnnnnnnnnnnnnnnnnnnnnnnnnnnnnnnnnnnnnnnnnnnnnnnnnnnnnnnnnnnnnnnnnnnnnnnnnnnnnnnnnnnnnnnnnnnnnnnnnnnnnnnnnnnnnnnnnnnnnnnnnnnnnnnnnnnnnnnnnnnnnnnnnnnnnnnnnnnnnnnnnnnnnnnnnnnnnnnnnnnnnnnnnnnnnnnnnnnnnnnnnnnnnnnnnnnnnnnnnnnnnnnnnnnnnnnnnnnnnnnnnnnnnnnnnnnnnnnnnnnnnnnnnnnnnnnnnnnnnnnnnnnnnnnnnnnnnnnnnnnnnnnnnnnnnnnnnnnnnnnnnnnnnnnnnnnnnnnnnnnnnnnnnnnnnnnnnnnnnnnnnnnnnnnnnnnnnnnnnnnnnnnnnnnnnnnnnnnnnnnnnnnnnnnnnnnnnnnnnnnnnnnnnnnnnnnnnnnnnnnnnnnnnnnnnnnnnnnnnnnnnnnnnnnnnnnnnnnnnnnnnnnnnnnnnnnnnnnnnnnnnnnnnnnnnnnnnnnnnnnnnnnnnnnnnnnnnnnnnnnnnnnnnnnnnnnnnnnnnnnnnnnnnnnnnnnnnnnnnnnnnnnnnnnnnnnnnnnnnnnnnnnnnnnnnnnnnnnnnnnnnnnnnnnnnnnnnnnnnnnnnnnnnnnnnnnnnnnnnnnnnnnnnnnnnnnnnnnnnnnnnnnnnnnnnnnnnnnnnnnnnnnnnnnnnnnnnnnnnnnnnnnnnnnnnnnnnnnnnnnnnnnnnnnnnnnnnnnnnnnnnnnnnnnnnnnnnnnnnnnnnnnnnnnnnnnnnnnnnnnnnnnnnnnnnnnnnnnnnnnnnnnnnnnnnnnnnnnnnnnnnnnnnnnnnnnnnnnnnnnnnnnnnnnnnnnnnnnnnnnnnnnnnnnnnnnnnnnnnnnnnnnnnnnnnnnnnnnnnnnnnnnnnnnnnnnnnnnnnnnnnnnnnnnnnnnnnnnnnnnnnnnnnnnnnnnnnnnnnnnnnnnnnnnnnnnnnnnnnnnnnnnnnnnnnnnnnnnnnnnnnnnnnnnnnnnnnnnnnnnnnnnnnnnnnnnnnnnnnnnnnnnnnnnnnnnnnnnnnnnnnnnnnnnnnnnnnnnnnnnnnnnnnnnnnnnnnnnnnnnnnnnnnnnnnnnnnnnnnnnnnnnnnnnnnnnnnnnnnnnnnnnnnnnnnnnnnnnnnnnnnnnnnnnnnnnnnnnnnnnnnnnnnnnnnnnnnnnnnnnnnnnnnnnnnnnnnnnnnnnnnnnnnnnnnnnnnnnnnnnnnnnnnnnnnnnnnnnnnnnnnnnnnnnnnnnnnnnnnnnnnnnnnnnnnnnnnnnnnnnnnnnnnnnnnnnnnnnnnnnnnnnnnnnnnnnnnnnnnnnnnnnnnnnnnnnnnnnnnnnnnnnnnnnnnnnnnnnnnnnnnnnnnnnnnnnnnnnnnnnnnnnnnnnnnnnnnnnnnnnnnnnnnnnnnnnnnnnnnnnnnnnnnnnnnnnnnnnnnnnnnnnnnnnnnnnnnnnnnnnnnnnnnnnnnnnnnnnnnnnnnnnnnnnnnnnnnnnnnnnnnnnnnnnnnnnnnnnnnnnnnnnnnnnnnnnnnnnnnnnnnnnnnnnnnnnnnnnnnnnnnnnnnnnnnnnnnnnnnnnnnnnnnnnnnnnnnnnnnnnnnnnnnnnnnnnnnnnnnnnnnnnnnnnnnnnnnnnnnnnnnnnnnnnnnnnnnnnnnnnnnnnnnnnnnnnnnnnnnnnnnnnnnnnnnnnnnnnnnnnnnnnnnnnnnnnnnnnnnnnnnnnnnnnnnnnnnnnnnnnnnnnnnnnnnnnnnnnnnnnnnnnnnnnnnnnnnnnnnnnnnnnnnnnnnnnnnnnnnnnnnnnnnnnnnnnnnnnnnnnnnnnnnnnnnnnnnnnnnnnnnnnnnnnnnnnnnnnnnnnnnnnnnnnnnnnnnnnnnnnnnnnnnnnnnnnnnnnnnnnnnnnnnnnnnnnnnnnnnnnnnnnnnnnnnnnnnnnnnnnnnnnnnnnnnnnnnnnnnnnnnnnnnnnnnnnnnnnnnnnnnnnnnnnnnnnnnnnnnnnnnnnnnnnnnnnnnnnnnnnnnnnnnnnnnnnnnnnnnnnnnnnnnnnnnnnnnnnnnnnnnnnnnnnnnnnnnnnnnnnnnnnnnnnnnnnnnnnnnnnnnnnnnnnnnnnnnnnnnnnnnnnnnnnnnnnnnnnnnnnnnnnnnnnnnnnnnnnnnnnnnnnnnnnnnnnnnnnnnnnnnnnnnnnnnnnnnnnnnnnnnnnnnnnnnnnnnnnnnnnnnnnnnnnnnnnnnnnnnnnnnnnnnnnnnnnnnnnnnnnnnnnnnnnnnnnnnnnnnnnnnnnnnnnnnnnnnnnnnnnnnnnnnnnnnnnnnnnnnnnnnnnnnnnnnnnnnnnnnnnnnnnnnnnnnnnnnnnnnnnnnnnnnnnnnnnnnnnnnnnnnnnnnnnnnnnnnnnnnnnnnnnnnnnnnnnnnnnnnnnnnnnnnnnnnnnnnnnnnnnnnnnnnnnnnnnnnnnnnnnnnnnnnnnnnnnnnnnnnnnnnnnnnnnnnnnnnnnnnnnnnnnnnnnnnnnnnnnnnnnnnnnnnnnnnnnnnnnnnnnnnnnnnnnnnnnnnnnnnnnnnnnnnnnnnnnnnnnnnnnnnnnnnnnnnnnnnnnnnnnnnnnnnnnnnnnnnnnnnnnnnnnnnnnnnnnnnnnnnnnnnnnnnnnnnnnnnnnnnnnnnnnnnnnnnnnnnnnnnnnnnnnnnnnnnnnnnnnnnnnnnnnnnnnnnnnnnnnnnnnnnnnnnnnnnnnnnnnnnnnnnnnnnnnnnnnnnnnnnnnnnnnnnnnnnnnnnnnnnnnnnnnnnnnnnnnnnnnnnnnnnnnnnnnnnnnnnnnnnnnnnnnnnnnnnnnnnnnnnnnnnnnnnnnnnnnnnnnnnnnnnnnnnnnnnnnnnnnnnnnnnnnnnnnnnnnnnnnnnnnnnnnnnnnnnnnnnnnnnnnnnnnnnnnnnnnnnnnnnnnnnnnnnnnnnnnnnnnnnnnnnnnnnnnnnnnnnnnnnnnnnnnnnnnnnnnnnnnnnnnnnnnnnnnnnnnnnnnnnnnnnnnnnnnnnnnnnnnnnnnnnnnnnnnnnnnnnnnnnnnnnnnnnnnnnnnnnnnnnnnnnnnnnnnnnnnnnnnnnnnnnnnnnnnnnnnnnnnnnnnnnnnnnnnnnnnnnnnnnnnnnnnnnnnnnnnnnnnnnnnnnnnnnnnnnnnnnnnnnnnnnnnnnnnnnnnnnnnnnnnnnnnnnnnnnnnnnnnnnnnnnnnnnnnnnnnnnnnnnnnnnnnnnnnnnnnnnnnnnnnnnnnnnnnnnnnnnnnnnnnnnnnnnnnnnnnnnnnnnnnnnnnnnnnnnnnnnnnnnnnnnnnnnnnnnnnnnnnnnnnnnnnnnnnnnnnnnnnnnnnnnnnnnnnnnnnnnnnnnnnnnnnnnnnnnnnnnnnnnnnnnnnnnnnnnnnnnnnnnnnnnnnnnnnnnnnnnnnnnnnnnnnnnnnnnnnnnnnnnnnnnnnnnnnnnnnnnnnnnnnnnnnnnnnnnnnnnnnnnnnnnnnnnnnnnnnnnnnnnnnnnnnnnnnnnnnnnnnnnnnnnnnnnnnnnnnnnnnnnnnnnnnnnnnnnnnnnnnnnnnnnnnnnnnnnnnnnnnnnnnnnnnnnnnnnnnnnnnnnnnnnnnnnnnnnnnnnnnnnnnnnnnnnnnnnnnnnnnnnnnnnnnnnnnnnnnnnnnnnnnnnnnnnnnnnnnnnnnnnnnnnnnnnnnnnnnnnnnnnnnnnnnnnnnnnnnnnnnnnnnnnnnnnnnnnnnnnnnnnnnnnnnnnnnnnnnnnnnnnnnnnnnnnnnnnnnnnnnnnnnnnnnnnnnnnnnnnnnnnnnnnnnnnnnnnnnnnnnnnnnnnnnnnnnnnnnnnnnnnnnnnnnnnnnnnnnnnnnnnnnnnnnnnnnnnnnnnnnnnnnnnnnnnnnnnnnnnnnnnnnnnnnnnnnnnnnnnnnnnnnnnnnnnnnnnnnnnnnnnnnnnnnnnnnnnnnnnnnnnnnnnnnnnnnnnnnnnnnnnnnnnnnnnnnnnnnnnnnnnnnnnnnnnnnnnnnnnnnnnnnnnnnnnnnnnnnnnnnnnnnnnnnnnnnnnnnnnnnnnnnnnnnnnnnnnnnnnnnnnnnnnnnnnnnnnnnnnnnnnnnnnnnnnnnnnnnnnnnnnnnnnnnnnnnnnnnnnnnnnnnnnnnnnnnnnnnnnnnnnnnnnnnnnnnnnnnnnnnnnnnnnnnnnnnnnnnnnnnnnnnnnnnnnnnnnnnnnnnnnnnnnnnnnnnnnnnnnnnnnnnnnnnnnnnnnnnnnnnnnnnnnnnnnnnnnnnnnnnnnnnnnnnnnnnnnnnnnnnnnnnnnnnnnnnnnnnnnnnnnnnnnnnnnnnnnnnnnnnnnnnnnnnnnnnnnnnnnnnnnnnnnnnnnnnnnnnnnnnnnnnnnnnnnnnnnnnnnnnnnnnnnnnnnnnnnnnnnnnnnnnnnnnnnnnnnnnnnnnnnnnnnnnnnnnnnnnnnnnnnnnnnnnnnnnnnnnnnnnnnnnnnnnnnnnnnnnnnnnnnnnnnnnnnnnnnnnnnnnnnnnnnnnnnnnnnnnnnnnnnnnnnnnnnnnnnnnnnnnnnnnnnnnnnnnnnnnnnnnnnnnnnnnnnnnnnnnnnnnnnnnnnnnnnnnnnnnnnnnnnnnnnnnnnnnnnnnnnnnnnnnnnnnnnnnnnnnnnnnnnnnnnnnnnnnnnnnnnnnnnnnnnnnnnnnnnnnnnnnnnnnnnnnnnnnnnnnnnnnnnnnnnnnnnnnnnnnnnnnnnnnnnnnnnnnnnnnnnnnnnnnnnnnnnnnnnnnnnnnnnnnnnnnnnnnnnnnnnnnnnnnnnnnnnnnnnnnnnnnnnnnnnnnnnnnnnnnnnnnnnnnnnnnnnnnnnnnnnnnnnnnnnnnnnnnnnnnnnnnnnnnnnnnnnnnnnnnnnnnnnnnnnnnnnnnnnnacacacacacacacaattcattaacgcccggcggctgagccgaaagggcaactatcgctaaactactatacatgtcatagtatatacaattctgtgactcattggagcccatacacaagaccttggcgtatttgtcattctcagcatgcagtgtcgcagcggatgctcgtgggttagtaagttggttagtagactggcttgaaggcgcttctccaagtgttcaacatcctatcttcggcagttgaagcgcgtctaccgtctgtcgcagggggttggggttagtaagatggtgattttgtccgttcgtcggcaaggttaagtggcctcaagtcggcccgtagcgatcgcaaatcgtattgaggctcgcactgcatccaaattcggcgtccacttctggtcatcggaaggcaattttccacccaagaagaaggagatattacttcggtgagtgtgggtacattgcaacatttccgtccggtgcgcggtccacttccgacatcgaaagagaaagtggtccaccgtctctcttgcttgtccacatgcacattgatctgtctcggcggcattgattcgaaagagatatccattgagtcttgccatacccgtgcggagttgggctaacacgcttgcttctttccacgatagtcggtcatacaactgtcgcgtgtgttttcctggaagggctttatccactcgtctcgaatgtttcccgatgctctcgggtagcttactgctggggattgcttgggtacgcgcgatctttagagtcgtcgatttcattttcgggacctgtccttgcaaaaaatatatacagtagtattcgaaatcagctataccttttcactcttgcgacttgattcccggaaaataaatccgagggttgtgagttctgattggataggaagcgaaggcgccgcctttcagaccgctttctagattgataggagtatcttacaatacagtattaagacatgactagacgtattttacaggaaagtgctatacgcttgctacctggtatgcccctcaattcatgcacaaggcagattcccccccgtcaccatccggctttctgcgacatttcagtgttcaatatcaggcaaaacgacatggctcctagactccctacttcgaagctccatctgatccgtgatatgatagaaagccagtccttcaccacgtctcagatggccgaagaagctgaatgtaccaggcttacgatcattaatattcgcagaaatctacgccaatttggagccatccatgcccctcaaacccgaatcggccgaaaacgaaccgttacaccgctgatgataaatgctctttgtgaccacctttccgagaagcctggtctctacctcgatgagatggcggtcttcttgtgggatgagtttcaaaccatgattacaacctccagcattagaagagcccttgtagcaacaggttggtcgaaaaaggtagtgcgccagcgcgctaaagagcagaacgcggacttgagagactactacctacacaatttatcggagtttcagtcgtatcacctgatatatgttgatgaatctggatgtgataaacgggtcggattcaggcgcaccggttgggcacctcttggcaaagctcctctgcaagtaacacagttccaccgcgaccagcgatatcaaatactacctgcgtatactcaagatggaatcctcctctcgcgtgtatttcgcggctctacagatgctactgtgttcgagggcttcatatcccagcttctgcagcattgcggaaggtggccagagcccaaatctgtcctcgtgatggataatgcatccttccaccactcagagcggcttctacagatgtgtgaggaggccggggtgaaattagtttacctgccgccttattcgccggacctgaatccgattgaagagttctttgctgagcttaaaggtttcatcaggcgtaattggaattactatgaaagagaccctagtcaaggatttgatgttttcttggaatggtgcatcaatgtggttggcgcaaaagaagaaagtgcccgaggtcattttcgtcatgcaggcttaaaaatcgaaaatattggagcttaaagatcaggcatgttgtgttcgatatgcgtcacaagtggaagacaaagaacgtcccacagtaacaatcaaaatcgcattttcctctgtgctgtcctggagtcccccggtgcccaaattgaacgcacaattggactatggtttcggccgcttggctcataataaacaaacgttcactgtttaccatataatagttgcaacttgggaagttagattgtagataatgcaagaattctcaactactttattgatctatacagctgtttttctgtaaaagcagaccaaaagcagacactaaactagaataggtgaaaccttcagattggtattgatcctagcctaacaattgagaagcaggtagctagattatagagtccagttggtttcttcggctgcaagcatccctagataccatatgcccattagcacagtgaggtgaccatggcctccagctgtccaggggattgacatagagacggctagactgccgtttgtatcgagacgtttgaccccaatcagctcagtgttggtaagcacaaagccatggcgcgctttgtgttggcccatatagaaattcacctgtgaaagaacctgcttgtattgttcttgaaagatggggttttgcgaatggcggtagtcagaacgccatttccacgagaccttcatatcccctggggcccggttcgtgctgtcggcgtaggtgcccccgagagtgacgaaggcagtgtctggtcgaaactggtcgacgtacgctgctgagcctccaccgtcaaaagtgatcggcacaaggcttagttgcttaagccggggtgcgagctcctcgaacccggcgcgcagtgcgcgcctgacacggggttgaagcagctcggcaaatcgaagatgaaaatgaggttcatccctaatggcggcaggaggggacctgaagggatcggatgcgatctgctttgagttcaaaaagccgccatatcgttgaatgatcgttgcataattgaactctggccaatcgacgacctgggtgatgtcttccgccccatagcgggggttcgttgtattccgcgatggggcagagccttgaataggaattgccgggagggaaatagagagatactgtaaaagagattggttgttcatattgcagtagtagagtaccacgtctggtgaatatgacttaggagtaatagcctcaggtggtggatacctaatgatagctgatcgtcgagataggcaagaagaatcaggatagagaaataaaatgatgggcttgggaggaaaggaaaatatagggagaatatccgatccaaaattacacatatatctgataggcaatcaatagcgatgtttttggatatagttgattggtgtgactactacagtaagcgctctcacttgaagtgtatcccttggcataagcagagtgaaagaaaacgacaagtgaaaccccgagcgaaccttggatttagagatgtggtgaatctagtggctcaagaggtcttgaaaaaaaaagcgttcattggaaccctggatcaggatcatagtcgatggggcctcaagcacccgccttctcgtttcagtctcagagggcgcttacatgcagccactgaaaccgacccactctgatatttcctcctaccagcggcaacgtagtggatttgattcgcgaggtctgggtttgggatccacatgacccaaagtcaaacttacataatccggctattagtaaccaagacctgtcccattttcgttgcctgacctgcttcaacctctttggaaacgtaacttttcgacaggacaacaatgcatctaagaagtgcttccttaacggacatggatccctccagaatccatataatcagggagattacgtgctctgatgcatcttcaatattcgaggtagatatggatggacaaaagtatgctttgaagcttttccacgacaacggcgaccctggatataccgaaaaaggtcgtgatttgaaccgatttcgctgcgaactcaatgcatataagaagcttttcgcctctggtgtttgtgcgcgcagtttcgttccaaaattctacggctacatcaatcgaatggatcccgcagcatttcatcctgctttccaacatttctctcaagacaagctcaagccgagagcaatattgctagagtacctcccaaatgcagagagtttaaactccattaactactcggatacgctctatcctcaggcaattgagggcatgaaggagatacacagggcgggcgttcaccacagagacatctacccgaaaaatcttctccttgttcgtggagaccctgataggctggtctggattgactttgatgtttcaacgaccttcaccgactttggacctgaacagctggcccgctgtgactatgaaattgccctcgtgaagggatttggagaagcactggtaaggactccgctgctccctatgttggaagcagttagcgtgctgactgacgaatgcagagaggtgaccaggctgagggactcccgcctaatacaaaattctattaaggattctataggcctacgaatattccgacaatgtttgatcgcgttcatatgtacgttcttgtaatagatgagttgggcagagctctgagtatgggctgttttcattcggcttactttattttacttcattcttaaaatgtggggttatgtaccgtacagagaaatgcagacctttagaaacccaaagatgtcaagacctgcggcgagacatgtccatcgtagattagaattctatcacgatcgtctaaggggcgcaccgatactgtaggacattaaccgcaaaattcttgtttcttcaccatccgcacctgctacggtgtgtctcgaaactggtgtacccttgtacacacttcaagagattctcgagccccacctgccaatatacactagtctacgttggaaattcttccgagtacccctgttagaatgattctgttgattcaagcaaggccatatctccagaggtcaagaatggataattgacatgactggaggttctctcgagaccatcctttcttcagcctcacttttcccatgctctcatttgccccattggtattcgaatttcttgaattcaaatggcttgtattcaactgtggaaaggggtagcgcttgtctgaggctggacgacacactcaaatacttttccatagtcgctatacataattcagcagcaaacgctggatatgctttcaagagatcgtaatcaatccccggggtcagccctccttgaagttctcgcaggtttttcacaatcagtttgttcgctagcttcctaatatctcggtagtcggcatttgttgaatagagttccttgattgcctgcgccaagatttgcttttcggagcaattttcaaatgaatctcgaaagttctcttctgctttgatcttcagatcttcgatcatgaagtaatccgcttctccatacatgcggagatggaagtagcatgggtggcaatcagtcaatgattcgtcgatagcgtccatttgctcgctggagcctgtcagggggccctcgccagctactgaagtctttttgttcactgagcattggttcataagactcgctgtaggttgatttgacagtgacattgcagtttcaccaacggcaccctccccagctgaaaggttctccatgtcatcttggtctttttgagagagtcgcaaagcctcttccgaatgccatgtatctgattctggtattttgtcgctatcgcttggtaaaatctgaacttcagtcatattgtcttgaactgtgtagtctcccgtgtaaagaaactctagcatcttctcgactagtgtcgggcttctagtatccaaagtgacagatccccgggattcctgtgagtcagtcacataagcttcggtctgagtgttccacaagattctgcctgaatttacaatacctcgaaagaaccacaacaggcgctttgaaaatacttggatctgggacacagaacaagcttatgagctgggaagactcgaccttggcaaaagatcttgagatcgctgtaatcggggttgaggtggaggctttgtgaagatgagcggaactcaagagtaaaaacttgccattactctagagaatctttatagttcttacctagcaatgatacccaaaacgacatcttggtactgtctctgttgcattttatcttgaatgacggcagtgggcttaggggggtcaggagcaggatcactgtccgttgatgaccttgatgaattgtgtcttctgtttcttctgttaaccatagtttggaaataatagaaaataccaaaaattagtcggttaagcggacgtacggcgagacggcaagtaagctatatgtctctgaaaactgcgcgccagatgcacagctgcccgaccccgccttttggttgaacaacaccagcaagtcgtgttcgtgactcaccgctggactgataggagggatctcttagggattcgacgtatcatatataaggcagttcgctccggtaatattcattgttgttagaaggggtgtgggtcatcccctaaaggcagaaaatgccagtgaggactctattgacatggtcatgtgttagcttccaccaaggatatggtcagcaagtagacaaagtagtggctgacaggctaaatactctgacaagtaggtgcataagtggtctgtagatacagcacagtaagaaaaaaatatgtcacttttcttgagctttggtgccgggtaagagccccagaccgtcactcggacataagagcggcaaggagatgtgatagctctccggattaccgaggagtctccagctcttttgtttaactcatttgcattgggatggaaaattcaagctacttttggattcccaatatggcaacaagggtacagtatttcgtgaaaggcgaatgatggattgggactaatacaggaatattaatattccggatttatccctgatacagactagcttacattttgaagtggggccgaggaatttctcaaagtagaggatagtgcaccggtttcgagacgtactgtatagctcgtacagtat

SEQ ID NO: 76 - DNA, 12359 bp, Penicillium roqueforti; identical to SEQ ID NO: 28
  misc_feature (511)..(6228): n is a, c, g, or t

SEQ ID NO: 77 - DNA, 10213 bp, Penicillium roqueforti; identical to SEQ ID NO: 29
  misc_feature (1520)..(7152): n is a, c, g, or t

SEQ ID NO: 78 - DNA, 9539 bp, Penicillium roqueforti; identical to SEQ ID NO: 30
  misc_feature (2691)..(6780): n is a, c, g, or t

SEQ ID NO: 79 - DNA, 9417 bp, Penicillium roqueforti; identical to SEQ ID NO: 31
  misc_feature (1273)..(7734): n is a, c, g, or t

SEQ ID NO: 80 - DNA, 9012 bp, Penicillium roqueforti; identical to SEQ ID NO: 32
  misc_feature (3461)..(7884): n is a, c, g, or t

SEQ ID NO: 81 - DNA, 8768 bp, Penicillium roqueforti; identical to SEQ ID NO: 33

SEQ ID NO: 82 - DNA, 8559 bp, Penicillium roqueforti
gaagactggcaaatgtcgggagtttcaggaatccaaggtgacttgagtggctgaggatccgatcttcagccctgtcttttctccaggttttgctttcgatataccatgggctaccgatccttcggagtacggaggattccgtagctgaacaagattccaatttcgagcatctaaatccgtctgaagagtttgcaggtgtattaatagcatggctgacctcagacatctagattcgggcttagtcacccaagaccgggggctgtgtggtactgtgtaccagtagtacatcgtagtactgtgaatacatctaaaacagcagaagcaaagaaaccaatataattcattcatgcatatataaaattcaagaaataatatgaaagatcaggttgcaagcctcaaccccccatagatcgacatccccctttcttatcgcgcccctctcattggttcctagcgccagtgacaaaccacgctgactagaatctcgcacattcaactgatattcacgtaattgcttgctccttatttgcccagtcgattgaaaccaggtcagctgttccatatctggccacaaaatagtcgaattccctctcctacggacatattttgggcgttttatagggaaactatgttgctaaatgcctcatcggaatgctcaaagtggaacgagggggaaacatgacacatgaataggctagtttgatcttcaataggctgtttagaatatagtggccactatgccaagactttatactgcctatgttaagttgtgatcccaaagaactcgcttcccaagatccacattgaacacaatgaaaataaatattctatcgtagaaatgcaaagatggacagaaaagttgatttcttgttctaaccagctagctagttaggtactcgcgggctatgagataaataactccataaagcaagtagtaaaagcctcaaaaagcccagttatggtgaatcacgaatggttggccctaaaccctcatttttgatgtggattaccaacatccgaataatgcctcataaggtaatgaatcgcactggcatgtcattgttatacatatcccttgcacctagcagatccattagtccggtaaattgacatctaatgtctcgtttattatacaatcctagtgctataccacatccggagtctgctgtgaattaagaaagccagaatagacatttacttcatacgacattatataatatgattgacaggctcttagttattaacgcctccattaaatgcagatacaacggcactgatccgtatacgcagatcccatccagtcaaacgtcggtctagtgtaactgcatgtctgcctccgaaagtatgaactagccactcagaccgtggaagtgacgcacaatgcaggcccggggtcacgacccccgcatggtatttagggcctagacttatctgatcgcctctgaaacactgtcattatgctcaggtacacctgcatgcatatgtgcgttattttgggagatccttttagtgaaggggcaaagatatgttacattgaaatatatgttagagatggtgaatgcagaatgtgcaaggctgaagtacatgtagttcatatactaagaccatgtttatgtttattcaaagaaaatacgccatttgcttcatcttagaacgacaaatcataaacagtctctgaatactacgttttctgattcatttactatctacatagagtataaagaccttcttgtctcttgcaaaaactctcttcttttgatattcttgagtcatcttgggtcgctatatatattacctagcatacatctcagctagcattcgtttatcctacaacataggcactctttcctcaatagaaaccactccctcaaattcatctatatatattcgtctcgcacagcctccacagtgccatttcaagcagaccagctctggccgactgaaggccccttgagctagcttgcgtcctcgcatggcttctcccgatatacagtatccaactcggagaactgttcccgacgtggtttgaaagtcctgaagagtgaatatatccgaaccaacaagatcaaatgactttccctatcccttacccaaaaaccgaaaaggaggtgatgctgaatcgctgtgggtacctccaagaagcggacattcgacgtgcattgctaacacggccagctcgttccctccttcctctgttgtccagagcgccctttctgcagcgccaccccgaagacgacaaggtaattacgttccctgctagtcacattcgttcattactaactcgaatcaatagctttctcttcgatagacaactcgcagtaaggctgaagcctagtaaactgggcaatacctagagctaaccgaaacactttatgggtatgacttttctacgggctctttctagcagtcgctgattatgaccagatctcgaaagtctagctgcgagcgtacaacccccaagtcctatgccgaaggagcgaatcgcacagcttaaccaccgacgtcgagctcctgagagtaatagctggagccaacagatgatccagactttatgggtatgacttgttctaccaggctatctcaagtagtcgccgaaggtcttgaaaggctatgagctttcaaaccccagaacctacaccgaagggaaacttataaagtctggttggtctgttggttctagccattactctctagagctcgccgtgggtggttggcctgtgcgtttcgctctgctcgttatgacttgttctaccaggttatttctggtagtcgctgattatgtctagatcttgaagtacagcttgtgatgatccggtcagtcacatgggtcgagagtgtttcataaatcaatgatattgttgatctatatcaccagtcacattatatgatccagtatttgctcgagcttatctagaatttagatattcaggtctcgatcgtgtggaaattggtgacgtagtagtcaaccagtagcccatgcattatgagtcgtgtgacaggagagccctggagcagctttgatggtggatttgccgagcacaactgctacatcagctaccaatgccttacagtgtacaatgtacaactgcatcttggtgattgcatatccatgttcgacatgagtgctgagcaatgtgagactaggaattgccttggtctgggaatacaaggatgttgtatatcagtaccactagacctcacccattgccagctcgctgttgcatccagcgcaatacccactcaaccaagatgctcaagtcttgcgagacctcgagcactctggcaatcttcttttgtacatcctggagccctgaatcagggttatccacaccctccatttcagtgtcgccagccgcttcaccatccactaacccagcagtatccacaactgagatctggccattcagtccgacttcaaagcaaattgcgatttgtctgggggttggaatgaatcgggcaatttcgggactctcgttgtagttcctctggtctgtgatgagtaacatgagagcaggcgattgaccaagttgaatgcgcaatgtcacgtcgactttaacgtcgtccacggacagtggattgggactctttcctctggaaggggttgaaatttcaattccagagtcattcttgctatcatccgagctactcagaccaagcagtagattcaatctctcctcgttaggatcatcgttattcaagattatgagcccgtcgtggtcggcaaagaggtctgaagtctggacaggaggagtgcgggtatttttgggggttgcagttgaaaattcgcctgcgttggcctggtccttaggaagatggaacgtcttccgaatcaaattggctagcagggcatactgccgtaggatctaaactgggttagtggaagacgataccagacaaaaacacacataccggaaggatatctgcgagctgtcgggggtgcgagaagggtaggtcatggatggtgcaaccagtaatggactcaaaggattggaaagtgtagttatgttgtttcgtatacggcttgccctttgaatcaacagcatgtactgacatccggcgctttctacggccaatttgaggggatgaaaccggcgacgtcaaatgcgaagattctgataccaacaacgcatcgtatgtgatcatcttaaactcttgtggtagctgcatgccgagctgacgataaatctcggaggctgcaagaataggaacgtcgagtgcaggctcaagtttaccgacgaatcggcgattgggtgatgatgactccagcatgctagagtctaatgccatagggtcatggttgccatgggttaaccgcgtggtctgcggaggatcaagccagttcacagacccagcggcaccatttgatggaagcaattcggtgctttcacctgcagtaaaaacttcacttccaacccattcctttgaaattcgcagtgacggatacccctcttcgcattcaatcatgaccgcccatgatctgccttgatcatccaactcgccctttgaaccttgatcatgttgcgggtcaatctccatagcgtccgaagacggtaggctctgcttcgcatccaggactttggcttgctcaacccaatattctaagccaagtccgattcgggtccccttatgcatggtgggacgtccgagcacacctgtgcaaaggtgctgatactcgccgccgtgcttcccattcttgctttcttccacccagatccgcctgaagttctcttcaagattctccaaggcctcaaagcaatttacctcctggctgagtttgtcaagctttgcaagccattgtaggttttcatggaactcgtggagtgacctccatttcccacattcggcgtcttccgcggactgggcgagggtacgtttcaagaccgctgtagcttcctcccgccgcacaccttcggtgtattcaggcgtggcatatcgtagactcacatccttgacaacatcctggccagcgtagaaatcaatctcaagatcgacaaagttaccggcgatgttgagattatcgtcttgccaaatggactcgaaatcttccagtcgactcagccgttctacactttcacgtgaaacccctctaccagagactcgggcccgtagaagctgaacgacctgctcgacgcgatgtctctgctcttcgtcgttgtcgcgcgtgactccgagcttgagtccctgcattgagagggtttgaatgtcgctgtcattcatgcccgaaccaacaagaccatcgtgcactgccggtgaaggactgatgccagtatacccaccgagcgccaagagagccgaaggcgagctaaaattgacaggatcgtcgacaccggggacggcgagaggggtagcgtattgatgggacgagacactcgtgtgatgcgcatgcgcaggtcctgagcctgttggtgttctcattgaaggcgatttatgggcgagggatcgggctagaggagcggaggatggatggggagaggtgaggtgagttggcgttgcgccaggtttggccgagggagtcgccatgataaaaggagaggattgacagatgaaagtgtcaacagtcaattacttatagtcaaatccgtccgaaaaatgggtatcataaggtatcgaagcacagaacgcaaggaaggcgggtatgtttgtatgcgactcaattctcactggcgcaagtgccaatttggcgggtgcacaagggaagaactgtcgaatgattgtacagatcaagtctcatgacgcatcgaagctacctcgttcccatgaacactgcaattaactaacgcgattggtttcgagaagccaaacagatagctccgtagaaagacacaatcacgtgcgtttgcattgtttgcatctttgtattcatctccgccttcgaaatcaggtcaactattgaaatgtaaatgaaacaaacataccaagccatgaggaccgggagattgggcactggcacggaatagatattcaacactgccaagtctcccaactccactagcaactattcaacccctctgccctctgcaggactcgcactgcatggaagcagaatttgctcggtcaaataaaacagaggatctccaccttgggagcataccaaaaatggatgatggttctctcaccagtgatcccgtacgtgcatcgttcttcaaagtgaacgttctaacactctgatagccctcgaagtgggactttgtcaactacattccctatattctctcatccaatatcgaaatacgattcgctgactccatgagaccgtatgaacggttgcaaaatcctggagatcaactcatcgactatattgaaggtcggacctgttattcagatggcagaagtggagaccctttttcttgtgagggaacggacgtcagtccccgtccctgaagtcttcaatgcttacacaattgccgattacggattcattttaatgtcgaaaattccaggactctctctaacacaatgctgggaaaatttgactggagattccaagacttctattgtccgacaacttgaaagctttatcctggagtggcgccagattgaaggacctctctttgggtccattgatggtggtccatgcgaagatgttctcttcaagtatccatgggatgcagaatatcggtactacggacccttcttaacaagaaaggaattcaatcaagggtggttgaggctctccgttacgccagacccaatgcgcagctcacaaaaagagatgagcctctagtggagagaattcttgtatcgcatagccaggatgagaggaaggtactcacgcatggtaatttgcaccaaagccatattattgtgaacggtgatatcatcaccggaatcatagactggagcgcagctggctacagcatatcggcaagggaatatttctgtttacagtggcaagcattggacctagaatggaggaaacttatacccactatactcgaaaccgacgagtatgaattttggaatgaagtcaatcaatccatggtagtttatactaggatctgagctaaatgcaacatgctggattcattttagagtcgtccagttgacacctccgttgcctgaatagcttgtgccggcttcccaaccatccccttccagaagtggtatgtgccagacgggactagctcttcaatctccagtgacagcaggatgtcataaacccaatcctggcatctcttctttccatcccttggtgcaggcgaagatttgataacttggatggcctgttgacgttgctgttcactaagctcgccaagtttgacctcgccaatggcatccatggtgcgcaggccggtacccattctcgattcgaattgaaaccagggtctgtcgatgtcgatcacctccacgtggaataggtcgctaatagggcttgagggcttatgcatcgtaaatccccaatgagaccggtgctggggatcttcgcctgccccggatatctctatagacagcacatacaccatgattcggtagtcctgggcatacaattagcctggtgtctcgacaagtcgaagggtaatcaaatacctgaattctgttccgaattcttcgttttttggagaccttggggatatgttgtttccctgcgggaatgaaaccgctattacgaaatcccccaaagagaaaaagaccctaaaataatcataacgattgtgcgcccgccttgtttcacacgtgtgcaattgggatttcgttcatgctcggcgaaccatatcttgagtccaaagcgcctgcgcattagagcggtgtaacagaatgtgttctggaagggaagtacgatttgactggctagtatgaccctccatcgagataccagtatcgtggcatatgtacgcagccatcaaaggatacgcacattcttcgttcatttcgtagcctccaaagcttcgggatagattaggtctcctacactgtttggctattcgatgagaatattaggaatggtcacagaaaagtagaatctatctgagaagctatctgaggatcagtcagttaaatagtaactagcgtaatcggtaagccgcccatatatgcaatacagacatctgccatgttgaatgtgttctagccagcttcaggcttgactctgtgctgcttcgtttgtagagacaaaaggcaatggtagttttggctacctgaggtctctagactctgatgctccacctaccccaccatacagccgatgtcatattggtgggggaggcgggatctaccctcaaaaatggccgaagcttttgtttagccagagtggcgcgctttccgcttttacaagtcgcatgaccggaaggtacgaccgggaaggaacatgttagacacctgcagccaaaggttaaatgcctgaatttgaagggttgatgtctgaatacagaccgctttcgacaccgctctattctgttaaacaaactggatcttctccaagtgcccggacaagccgaacagttgatgaaaggagttcgcgtcgaccgggggtagtgtaagcccagtgatacagtgcaacgaggcgtgtgcaagcacagagaccaagtcgcgaggtccaaatattagaataatcatgacgtt

SEQ ID NO: 83 - DNA, 7388 bp, Penicillium roqueforti
taggataaatactattattttttatccctaatatagttagattatataactaattaggctagtttttctatagaaaaactaacttagaaggctttccgcccaaaaaactagtcctacagtttttcgcctaaaaaatatcctttcttttattttatttattttaattactaagttatctattagattattatgttttaggactattattagttttagagagttagagaattgattaagatttttctgccatatgaacattcgccttaccaccgttttttgtcaaataactctacgtctatagtcggataggttaccttattaaagctattcttctattacacagatacactgtgataattaaggctactacggcggagaagcagtatctcctttaagtggaagtagacaattattataaccttaggagcttacagggataatagatccctgtctaccttaggacctttataccctatgttatatattagtactatggcaaattaatggcgcagatgatgatactaagctggtctagaacgcggctttagtatattattaacaataaaaattctagcttctttcactgggagcgcgacaaagctctagctgtactccggtcgcacagagttgtccacagcgatagtaagtggcgtaatatgctataggatgacctagatggccgtttgtttatcattgacttagaggatgtgaaatggctaaagtgtcctcgaactctagaaccaacctctggcaacatgcagtatggtcatcgcgtcggggcggggaaaagcaaacaaaggctcctatttagctcaactgccgtctgcacatgacatcagttaacgttggcgtctgtaccttcagatcacgtcatatgcccgtgaggcctagggcataatgaaatatagtgttgattcagctggcgtcttggttttgctaggagattcaaaggccgaacaaggctatcaaagctttgggagtcatccacgaagatcttcggcgtgtcaatgtcctttggaatgaaaagctcgggcgggcattaattagcgactttcaccactctaggttgaaatgtccgccagctcctaagcgatcacgatcaaagagacaacgtttacaaacagagtcagaagatgcaaagcgtttacgtgatactacagcctacagccctgaagcacacaagtccggaatccgattcggcttatgaaggcacggttcacatgaagaaatatttgatatataacagagtgggcgatagtagcatcgggaataggcaccgtggcgaataggtagcggcgtgacgccagcgctacgacacctacagatggaaaaaggaaagactggttttgacattacttatttcaggaatgggtcacaatggcagcgagagagcagggcatcggcggaacccattttctttgcatcacggccggttcaggctatatctggtcctccaaatctagcttcttatgtcatcataataaggattggccacttgaggtggttctgatttgactcggatattgctccgaacccagaaacacaacaccagagaccataagcggagtaccactgtctggagtatgacaacgatcatgcaagatactagactgatactagactatagatgccctggatgagtcgctctcaacgtcaatctcgcagaaccatggatcagctaagattttcgcaggcgaaggtctcttcgcgggatcatattgcaaaatccatcgaatgagtgccttcactttgtgggcttcctcctcatcaagatccaggcctgtccgatcgaatgactcttccatggatgtctgctccaccataagcggttcctcccccggagcgactcctccaagctggcaattaaagagcttcctctcgggcgtaaagtagagagacgaggtcgtccaatgcttgtataactcgtcggggagggcgccgagctgggcggtgagggagagaagatgatcgtcatcttccatctcggaagatggtatacagaagagtggctgtccggtgataagctcaaagacaaggcaaccgaaactccagatatcaacggtattatcgacggctccggtaagaataaactcgggagctcgaagaccgagtggagtaacgggctttgctggcgggtcggtaaagaaatatgctatccaaggcagtcaggtatgagtatagatattcgtcaagaaaaagggacagataatcgaaacgggagggactgaccaccgcccatatcggataatttgaccttaaacccctcggcgtagcaggtaaagggcactagtggctgcgcaacgcaaagatatcgaggagcccatccatcttgtttaccgtctagcctctgcacgggaggcgagatcgaccgggattgcacatcttcctcttgccggagtaagtcctcaggcgtcgagtcgatatcgttaagagtgaagagtatgtttcccggctggaagtctccatgggcgataccattttcgtggagaaatacaagggcctgcaaggattgcttgaggatgctctttgccatctgaagcggatagcgaatcttcatttctcgcctacgaggtttgaactgcggcagctcctcgaccatagtattcacactcggacccatgggctcaaataccaggcacttgtggacaccattgggcccgcggtgctcgaactcacctagcagtcgcgtgatatatcgggtcccttctaccggtgcaacttcgataatgtggcgtaagattcgtagctcggttgtcgatcccgagatttccgacacaaggatctttagggcgacatatccactatttcttaaaggaaatgagtaacgataatctatagcatcgtgggtagaatattcaaaagatgaccttactccaggtcacgggcgagccaaaccgttgagtaggagccctcgccaagtttccggatgaccttgtactggcggttgaagacgtcgccgagaacgactggatgataaccacctgggcggtaatcttccacccactcacagggtaatgtaatagttttgaatcgcagttcgccatctattaaggcccttgatggcggagtgggaggagacgaggtactcatggctgcgctgcgttgtccgagagttgccgaccggaatgtttcgtgagagatgcagaattgtaatggggaagtccgaaactttgggagaaactggatagacgttctcaaagagcgtgcagcaaggccttcggggtacatttatggtccctcgacatgcacgagtctcagaattgttacggaactcgcgccatggcgcgtactatttttattcattgtggtgtgatatgactaagcaacctgagctgttattattggcctaaatggcggtccggtgtcaacgtcaaccgtagtgtcacgccgccaagtacccaagttactgaattagcaaccaatgcggacggagtaccagcgtagaactgatccttgtgcgccttcctgaaacctggtcacgtatagctagtgcgttacaataggcgccctgcccttggaatgattctaagtggttgttcgataatgtacttaccgaaggagcgagcacgttaggtggatagttagtcgtggccggccacattaagtttcaacaggggccagcgcttatgcacctcaatcaccaaaacaaagtccatgaatcgaagaccgagatgagtgactagacggtcattgtctagctgggctctgatgtgagcaaggaatataagttgacttgagttcgccatggctcaattgtattcaaacaccaactgcctgtgccaagaaccgtatttttctgagctcattttccatcttagtttctcaaagatagcgcaactcttggtttatcatggatgccagcaatgttactttcgacccgcctaacatgtactcgaacaatccccaggagaagacgaggattatcaacttggtcattagccaagcacctgccggggctgcgagtgctatagtcgtgtaagttagtcgcatccctcattacaaccaagccgctgacgagagattttaggaacggctggcacaccagcagaagcgacaaacggcggcactgtaccgtcgattactacaacgccgctggtggctggatcagccgagagcacattatctgacttggctgggacaggagagggttcctggtacctgtagctttagattctctggggacggaagtttgttgaacagccgatgcctagaccgacctagcaggactagacagtccagtaagatccggattcagatatatgtatacagagagcagcaacctattttccctcttttttcttttctttttttttttggctcacggtagtattgataattcaaaaagtagcatgggtagagaataggtgaaaacgaaaaacgcccacaacgatggatataaaatattctgctcctcgactgataactagctgtgactgaaagcatagatgtgataagccagtgccccttgatcttacctttgtaataaagatcgagaaagcagtgtaatatggctactgtaactggtgattcttgattctctaggtagtcgtgctgtgataaccaacggcatggcggaggaatatcatcaaatcaatataattacttttcaaggagcgattgacagtgagctggggcatcatgcacgaagaagtatcgcttgaaaacaaaacgggggagtaatggactaggagctaatgtgtgattggttcccgactactccttgctctatcttggagaagctctaggctacgcgatccacttagaccagactacttggtcttctcaaactattaatgttccaaagaccgtggtgatatattagatcttcggaattcgtatccagagaaggaaaagtgactctttttgccattaaatctgaactaacttctctggcaatgtccggtgtgaccgttaggcggaaatcttgtcgatactggtttagctcaaattctgtcttgttcgtatctttcaatcactaggcggagggatatatattctaaatctaggactactatatgatttgcctaagtttgtggcaatgggctgctttgtggatgaacgatcgcatgttctgctactgattagtaaatctggaattgacttaaagtatagtgaatcatcggccaacacttaaacccttaaaacgactttcttgagctttctccttaagatttctgatttctagttcctaactatagcaatctttcttaaaatacattttattctctatactgttgtaattttgatacgggttaggattgtgtataaagataaagctattgtctaatgcccgaaaagaaaaaggagataagaaagtaggctgatgcgtatattgacagattagtgagtaaaggtaaatgaaacgatagaacactgcggcgactaaggatcagtaagaagtaaagggccgggcaaatgatatctaattgacgtttaggaagccctgcctaaatgctaacggattttgtgtggtaaatggctcccttgccgctctttcctacttagtgagctctcttttctaacatccgctttcctgtacccacgaaccctccctctttagttagctcgctgcctcctttactctcgtaacccagtcctttataccgttgacagtatcaataggcgagttcttcctctctagtaggaataataaaaccttagtaggactgaaaacttggtctggtaccttggaagcaaagttctcggcaagcctatcgattatctcatcgccgaatcgttcttcaggttgcttgaagtccagcgtccgcttgaagactatgtgaaaaagctgagtagaagtggtttcatcggtaagcttgaaatgcaccttcttgaccgtgcggctaggccgaatgagtgcttcgtctaaatgttcgatgtgatttgttgttatgataagaacccgaccctcttaggataagataccattacgaatattaagaaggctagatagggtgactctagtactttgcttgttctcttagtctatatcagtgttttccctgcgccctataccagcagcatctacatcttctaggagaacgatacagtgaggcggaagcttagtaaatagtgccattaacttgctattagaaatgcctaacaattaaagcgtataaatatctagttcaaattcccctgctagtgagagactgaaactggattttcctataccaggaggaccatatagaagatagcctcgttagtaggggataccgcggtcggcgtactaccgctgtgtatctttattaaggaagtcctttatatcccctaaaaggtcatcctatacctgcttgtctataataactgttaagataggttggattggtctcaacctggttttcttctactccccttcgcggtgcttaaatacagtgatcttcttatcaatgttattaaggtatttcccttagtattctttaataagttctttaagaatattcgggtaaagactaatagaggaaatacgaatatcttctcggtagtccttgactgtatagtgaaggataagcaaatgtcccttatactagaaaggaaaagacctatcctatagagaaaaggttaaggctttttttcttccgcgaagttaggtagtcgctcgctatagagatctcacgcgagcgatcaaagtatgggcattatagacgaagggttggtaagctatccaatcgacgagcatatcgtacgcctcgttataatacgagatatgaatcgtcgaagctatagattgtcagacccttccaatcataacgggtggctcacaaactgaagtagtttctcactagctcctatatatagcggatagtatagcgagtgaaaagggcaaaagctcccagggtacagaatattcgagtgtagctatctaggttaccagtaagcagctactatatggaggtagagaccatactgagactggggaagaggatatctataagagacatctagcgagggctattgattagataaaaagaaccttcgttaatagtgcccatttcacatgagtctcgaagaatactggtgattagataatcaaatgtggaaggcaataagtagagaggtgttttagaggctggctactgcgaatataattgcttagggttccaagctcccttttattatttatatccaagatattagacttttgtctctgggcactgggctacctcactggttctttgtattagatactagttctataaactcggcgtttagctcaaggtaaatgtgctgctgtatgatgtatattgtccagctaatttcgagtgatataggagaagtctgaataatttaataattgttttatttaaagctataacggataaaggtctgtataagagggaaacatatgtaaacctatataggcttaggaaggaatatctatattatta

SEQ ID NO: 84 - DNA, 4874 bp, Penicillium roqueforti; identical to SEQ ID NO: 36

SEQ ID NO: 85 - DNA, 4856 bp, Penicillium roqueforti
cgtacccagcctagtgggttgtggtttagaatccaactcttttggcgatatacaggctacaacaactatatatatccgtgtacgtacacgtagagtgatccacttcctgaaaacgaacttagagcctcgtcgaggcctatcgtggcctagttgccgcttgcgttgttaggctgcccttatggcgcgcgactttgaaaccgctgtgacgcctcagcgaagtccaacacggcattcaccgttttggttcgcgagacggtgtctggtttacctctctcaccttctttggagcctcccagcagactcgatatgctgttaaatgcgtccccaaccttcatccttaattctcttcttaactcctgcagttttggacagtccaccaggacgtgagtgactgtttcttgcgcgccgcacgcgcagtgatcgtcatcacggaagccaatggcgttcctgaaggtggatagccaattatggcccgtgcgtagctgtgtcagcaggtatgcccggcccctgggcaggtttccataaagcttcctagtgtaggccgccgggagagtgctatcgattttccgcaggtgaccgcctttggtggacgattcccattcccgttcccactgtgcgcggatgttgtcgcgaatgagcgccttcgtccttgtcagcaaagggcggaaggggtgtgtcttgcccgggcttgctgcgtccttggctagccgatctactgcgtcgtttcccgggttgtcgcagtgtccgggtatccattggagacggagcgcaattccctttgcttgaacctccgtggccgcttggaggatcgcgtggatgatgcattgtcctgatttgtttcctgggttctggattgcttgcaatgctgatctgctgtcgcagaggatcgttgcggtcgtttttcccttatgttccgttcttggccgctgattgctgatcttgaacactatgctgacggcgtagaagatgcctatcagctctgctacgtgaaccgaccaccggtccatcggtcccacctggacctgttgggattcgataacctccaggttattgccgagtgctacggcagcggcgcccaggtggtcttcgcgtcccgaggcgtcagagtagaccacaatggtggacatggatcgcacggtcccggcccgttctgttgccgactctcggtctgacccgatctcaatctccgtgaagggttcggcccgccatggtggaagcggtcgtgggtcgatcgtctctagttcatccagtcttactaggtccatggtctttagggcttccgccagtggaaaacgagcgtacgacccgatgttgttcctacgtttctgagctcgccgtagtgtatcccaaataggatgatcgcgcggcagagtgtgaaggcttgcaatggtgttctgcgctcggtggcggaggcggaggtgtgttggcagaacgtgtgcttctacttccagggttgtagtagccaccgtcctaaaagccgataggatgcggatcaacgtggtcctctggactgtgttcagatgtcgcaggtgagtcttgtctcgcagagggtcgtaccagatcgtcgacgcgtagtctacgaccggtgtgacacaggcttggtagagctgtcgcatctgttctgggcgtaaatgccgcagcccgcccagagcaatactgaccttgatggcgcgtttgatcgcttgttggacgtgttctttccagcgtaactcctggtcgaaaaccacgcctagcagcttggccgtgggcgacgcttcgactgtcttcccgttcataaccacttgaccctggagctgttggcttcttttcctggtgatatgaatgagctcggttttctcggctgcgaagcaggacccggtttgacgggcccatgctttaatgcgggggctgtcttccgattgaatcttggctaggttgtcttcggccgagcgccctactctccagcggaagtagtcatcgatgaaggcggatgcaccgccgtgaaaagtgacgggttggtcgactagatcagagttgaagaatgcgaacaggataggcgagaggggtgagccctgtgctagtcccgcattcgctagcggcgtgacctcggtgcggaagtcatcaaatcctatgctagcgtggcggtcgctcatgaagctcgcgatccattttctagccacggttgggattctccttgcccggaggcaggcgtctaggctcaccttgttgactccgttgaaggcacctttcaggtcaaatgccaccagcgttaccactttgtgtttgtaccacgctcggtcgatcgcgttagagaggaccagaagggcctgttcggtggttctgcctggtcgccctccaaactgggtgtccggtagcagaccgtgtttttcggcgagatacgacagtcgtcgcgccatcaccgcctccagaagtttacctagtgtgttaaggagtgagatcgggcgataggccccggggaccgagtaatctggtttcttaggtttctgtagcaccacactctttgcgctccgccatcccttctggtggtatcctaggctaatggacgcggtgaatattcctgtgatatagtgtttgaggtatccccacagctgtttccacacgagtgtcggtacgccgtcttcgccaggtgcggtagatcctttcgccgatttgagtgatctctggatctctagctcggtgatgggttgccacgggagttctagaggtgctcggatgagcgaatcttcgtccggttcgtccattttcgggaagaaagcatctaggaaagcctgcgccttttccttgttttcggtgagctcgttggtggcaacgtgcaaggctgggatgcacccccaggcctcacgcggtttcgtatagatagccgctttccagagcttcccttccccggcttcgtctaggaattgtttccagtgagacgctttaactttctcgatagtccgagtccatattcgtcgtttctgttgcatctcttgaaagagggtcgtggagcgggcgtcgtgtcgcccgagctccgcacagctctcttgccacttccggcgtaggtagttgacctcggtttgttgtattttaaggtctggggtaaaccagcgtttagagtatggtgatggtcgtaggtcgggagtgtatctatccaccgccgtggcagtcgcctctgtgagccgctcgactacctcatctagcgctggtctcgttttcacctccttccacgggcctatctgtcgaagcacgtcttcggcgatcttggcccagtccgcgcggtcgtaggctttcttcgccttagcggcgggctggcgccgaggactcaggttccattccgagtatgttgcgcggtggtcagacccgtagttctcgtggtagagatggcacttgatgagcagttctggtcggttcgtgaccgtctggtcgatagtggtgctcttccctggatcgttgaggggccagaatgtcgctgtccctcgtggcagacagccgtgtaagccatgcgtttggaagaagttgatcaattcgctcgcatcttcaataaattgcggttgaatgtggttggtgctccacgccgggtggtggcggttgaaatcacccgagaggatgacggttgttatcctttgatcctcctggatattggatgttattgtgttctggatcgccgtgagtgctagttctgctgacgcctcgttgggcgtgaaaagcgggacgcatgagaggtagaccgaaaagataagaaattgagagtcggctgtccagattttgatggctgtgacgtccgggtggtcgcaggcgatctgtcggtgggaggaggttgagactttccggttgatatagatcaggctgcgaaatcgacctgcatcagtctcggtgatcggtcggtaaagtcgccaggcgctgtggttgacgtgtgtttgataagtggtgatagacggttcttggatcaggagtacatccagatcttggctctggtggtcgttgataagcgcttccatcctaggccccgatttcatgatgtttaactgtagtatgcataggtttgcccctaacattgggagctaaaggttgccggcgttaggcactggcggtcactggttgggtgatcaccaccgcagtcgaggcatcgggctctcacccccggggggcaccgttcccgttcgtgttggccagcgcaatgtccacatcgaggcgtttccttgcacgaccatgcgaagtgtccaaatcgttggcaccggaagcatctctttctttttagttcgcagcgttccacactgccgatgaatctctggccaacgataaagccattttctagtataaaatcggtcccttccgcggtgtcgaaccagatgccgagggatgcgaacttccccagcgccttatccttcttcttaagccacgcgatctcttcgatctggaatcctcgcccggtaagttcattctcttccatgattttctcgatcgcctgtgcgtttgcgttttctaggtcaaagtcatctgtcggggtccggtgtaccacgacgccgaaccgtagcttgaccagtttcgtgttgtttcctaactcgttcagccattcgctattattgcgggccgcttccgccgactctgggtctttgaaccggatcacgtatcaggttttcgtggtgccaaccccggccacttgggcatcttgtgtggacggtgtgctcaacagcgccgtacggatgtgggtgttcgcggtctccgttgggagatatcgcccaaagttgttttgatcgctcatatcgttgtccctcgggtcgacaaaggaccgctgagtgctgattcggacgcagttccgatccttgtctatgtgttggtggtttggttgaagaggcgggggggttgctgcccccgcg

SEQ ID NO: 86 - DNA, 4627 bp, Penicillium roqueforti; identical to SEQ ID NO: 38

SEQ ID NO: 87 - DNA, 4406 bp, Penicillium roqueforti
gatgaaaaatgacagtattcatcctagattctgacaaatagtatccagtgcctcaattttagagagccgtgaagggttcaacagtcagccaagttttcttgaccgactcagcttcctgttcttcaacacggctcttgctcgtctctcgtgctgagcattgaaggtatcaaaaaggtcggtgcaaatagtcgctgtaaaaagaagccacgggtttcaacaggcctcaattaagagaggtgtccatcaacgctttctaccaagcagagcacttgcgcaacagaaggagccaagaagcctataaatacgtcctctacccccggcaatttgctctacaatttaatcatttgactacgcaaaatcgagcaagctttgtgcccgaggcatttgataagttctttctctttgacccagtactaaaatccgctgtactggctttatagaatacatcatggaccagcaagccagacggcgcatgtgagggatgtatctccaccagatgtactgccattcacgcccgccgatcaaagatacgagttttgggttagctggtcaaagtgtttatccaaagatgtctccgctatagcagtcgactgagctgatctatcgtactgtctctgtgtgtgttcacaagagaaagcgcgaatatccacgtcgcaggtatatgaaccttagcctgacaagtctgaattccactgattttgaaaatgatgcgattttcaatagaaccgaggacattcgaccacagtgcaagagcgcaagagccacagctctttgccgtctctttgtacctagtcttggccaccagaacatgtgagtcatggattaggctactagcgtccaatgggtgatccttgttttccttggagggcaggtagtaaagtttttcctagcctacatattcaaaagacaccgaggcgcgctgattttcctgtctgtcttcatgacaggtaagccgtacctccgcagacggccatttcaagtccgctgcaaggagaaggtgaggcaaaaacctgttattgatagcttaccaatataacactggtcatcttaggtaggaatagagggggcaagatgacctttttaccccgaggcatagccaaaccaacgagagctcaagacccaagaatcaccgatgaatagatattgatccacattggctggaaatatagtttgtagttattggggaatactcggtaatgttgattgtatgctcgtccaaagctttccaaagctttcaataaattgcttgtctttgtggcaaagctaacttcattctcccgatcgctatagggtgaaggcattccaatgtagagtaggttcgggtgacttgcaatcgccgcctgaagcgatgactacgtgaggaatagagtccatcacatcaagatattcgattgagccaacgaatcgtaatgtttgagcggcacctcatcacatgcttctacaccaattaggtctggtcttgggcgtatctattgcatgaccataatggaaaagggaatctgttgattgcgttcgaccagctcaatcagactgggggttgtaagccaacttcaccaaaagatgggacaaaaagtgacacggagttgaaacaatgcaaatcgatacatctgtcatgtgggtgcaacactcacgacactcgcaacactcacactaacactcacatcaagcgcccgaccgatcaccaaaacggtcaccttccaccacccacaccaaccagaacactcaccacaactagacctaggaatagttcgggccaggtcctaaattccgggaccgggaccgctaagaggaccgctaaaaggcccgccaagagggataaaaggtgtataaattatgatttataagtgaattatttcctaattaggacaatctatgattatttatacctagaacttttcttggcggtccctggagctcaaggttaaggcccgccaagccttggttttgacggacacactactcttcacaacacttgcgattcacaaaaacattcacatctaggactgctctacaccttaatagcggatgtcgcattctgttgggcggaggggctctatcggaccgcaaactatcaaggtggaaatattggtaatatttggctcttgtcaaggtttggccagacccgcctcaatctaaatctggcctagcacatccaggactggcgaatggaacaaagctatcagtaagggtccattatcttctggtagaccaaactccactccccgcccgattaacctggtgacagcttgagcacatgtatcaatccattagaaactagtcttaggaaaggatatggcgaagcaaatgtcgaagaacaacattatcctcccctttttcaggacctctacaggaatagaacttattcgtgagcttagtatattgactcagctccccaatattcttaaaccggtgaaccggcctatctcccagccccatacgagcccaatgaatcaaatcaacaatattgacatatacatttcggatagcctaaatagaacgcagacgacgtcagccaccagtccatgtcccattccataaagtcaaaccccacaggtaagaagatagggaaataatttttacataccactctagcagcattacaagtcctaggcaatggttcaatcccaacagcccgacaaagagaatgccaggaagcaagatcgctctccgacccaaaccagagtcggacttcatcttccagtgaattttgatactccctgcgtgctgttcagcttccgggtcgtttctatcccagtcgtagaagtccacgagctttgcgtatgatacggacggtggaagtgtggggtcgtatttgaaggatgtatagtatgcgaaaaagatgtctagtggtgtggggtttgaacgatatccttgtaaagggacaccgtgacgttctccagcgtgagctttcgagctttgtatatgtgcatctagcgcatcttgactgacgaatgatcgatcgcatggatcacattcgaaagttggggtatgagccgacgaagactgaagatgccgatcaagagcgctctggtcattgaagaggcgtgtacaagatttgcattcaaagtttggagtatgcgcttgtaaattctggagattttcttctaattcttttcgtgtaaggtagactaaactgtaaagtttgtgtgcgaatgaggtggcattcagaggtgagtactggagatggtcgttaaggaagttctggctaacaaaagttgtcgagcagatatcgcacttgaacttggatgtgttgcgcgtgggtgcactgtgaggaggggaggttcggatgtgttcttcaagagcatcaatgtcgaggagccagatcgaacataggccacagtagaactttatagcatgggctggtgagtcttttatgtgttggtcaagggaggtctcggatctgaacgatcgattgcacgaggaacagaatgccataatgagtagaccagactagtagcgagatggttgaatgcgtggaattgaatagtgtcggttaaagtggagaggaatcttactagcgttatttgtttcattcaacacccactgcttcctgattcccaaggcatcaactgctgaatcagcttgatagcgcccgtttattttgctatcaggattatatagaaatacacatctcaagtactgtgcaatggcctcattggttaattctagtactagtccatactgcatctctcggaaccgatagaattcccagcccggtatgtacagtaccataaaccaatcctaatcctgaccgtgaccgtaacgaggcgaggatcgttctggaaggcctgaacccgtttgcatttctcaaggtcggattgccaggcaatgaaattcttagtggcagcaacatgcctggacaagctcccgcgaaggcagtaggtaaatattttccttcgtctgcggggcgatcttgcgctcggctggggacacgagctcgaagagagtcccctctcgtgttgagaccttacttggcttgcccagagatctcaaggatcaatgtttaattatctgtgagtttcattggtttcccgtttcttctctcctccttgcttctccctcattcctcccaccgtcccacctgcgtcactcggattttctcggctctcgttttcttgatgcgatcgagtccaaactagtctcagacatcgagatctctggcggcacgtaattccttattttctttcgcgagtaagatggcaccttgcattgtaaggcggaagccttttataagctggtttaatgcacgatccgatgggcttagtggaacttcgagatcttgttcgaagtaaagctttgattgatgaagcctgtcgacgtagttctttctccgtagaatgtgtttttggggtaagatttcggcttgattcactacccctgctaggggggggggggggggttggggg

SEQ ID NO: 88 - DNA, 4065 bp, Penicillium roqueforti; identical to SEQ ID NO: 40

SEQ ID NO: 89 - DNA, 3774 bp, Penicillium roqueforti
aggaagattctctcatgtttataaacactagtccctcagctgctgtggtggatctttcccttcaacctctctacttagtgaccacttgaactagccaacatctcgtcaattctattccaccttatactgttaagatacagtctgataaaatatgtcgactatcaacatggtgaaatactacttctaccggggaatgctccctgaaaatcaacagaggctgcgagacttgatagcccttgcctatcagaccgcaagagacagaaaactctaccccaaggccatcctcatcaggtgagaaagaatttcagcacaacgaacaatgatatagagacttgtggcccatgtcattagagacttcgctaatgtcgaccggcaggtccaatgagcactccagtaccagtcaaggaggcatacacaagccggatcccttgggttggcatgtcactctctgtttcaaggacgacgtccagcttgccagcaatacccatgttgcttctcatggctacgtcaagggcaaaggggacttgacttttcttcaagcgactcactcaggggtgaagccagactcccacttgaagtcgagtggaaagccggtatggccttctgaaatggaattagatgttgcaccggagattgggtatggtcactttccaagtgctggtagtggttaggtttggggttaccaatatacttggatcttgaagggtagcaaccggtcgatacaaacccaagtcttgttatgaggattcaccaggggatagtgatagctgctgcctgtaaattcgtgttgcaattggtgctttgtgcggaaaatccaagaatggtagataaagtggctagcaaaacttggcaaaaacaaagacaattacatggatttatataacacattaccgtggaaatctgaatagtgcacaggcgtgcgtattattattattcgtcagcgtgtctgcaaggttgaaattgtcagagatagtgtcaagaaacatgaagatactgtctttttattgttgaaacacgtgacttttgtattatgcatttgcttactaattgtgtctgaccagatcgtcaaaatcagatcattgttgtttttaattagctagacaattttaccattgtgcatttattagtgcgctcgccatacatctaatttctatcaaatagtctcattagaactaattgtaggaagagctcaatttccaaatgggtttttggtagctgattggctaataataggggcttggcacacacttttcggatgttatagttgccagaattctcctgtccactgatttttgggtcgtctagtagaagttgtgccctcctctgggaattgtggcttagtggcgttgctcctctagaatctgaaacattccgcgatttccctagccgcctcgtccgcgcggtcgctacggcgactgactaagacaacacaggagggtcatgtgcgctctagacgtcaacttatcatctaccaaacaactaatacgtcaagctacaggaaaactatccttttgaaagatgaccttgtggcggcataattaatcggactttcaccgcctaatcatttacttaactcacgtcgtccggtaatggccttcgtgatcaggtcacgaaattcactttgggcccgtcaacaaagctctatatatcagatgttcattcacccaacatcttcctcgttgctctgctatccttgtttttggaaaatttctgctggtggactcgcatgcaaatcatttatggctttcaagaccttctcgtccagtgctgactctggtccactccccttcaaatatgtaccgatagaagaagtcgagagacttgaaaagtaccagcttggtgggtatcaccctattctgataggagatattcttcgatcccgataccgagtcgcccacaagctaggctacggagcctattcaaccacttggctctgccgggactaccagtctaatacatacgtggcagtcaaagttggaacggcggattcaaatgatcgtgaggttgatgtcctcaattatctcaaccactctaccccacttgatcacccggggaggacaatgataccctctatcaaagatagattcgtcctccatggccctaatggcacccacccttgctatgtgacaaccctagcaatgtgtagtgtctctagtgcgaaggaagggtcatacaaacgcatctttcaggccatgaccgctcgctcgctgattgtgcaacttttgctagccgttgagtacatccacagcaaaggagttgttcatggaggttagtcaccattctttatagctttacaaccatatgcttatacaacaactacatcagaccttcacatcggcaatattcttttatgtctcccagccgattttgatcagctctcaatcgaagagttatacgagaaatacggttcgcccgcgtcagaaccagtgattcgttttgatggtcagccccttgagtctagtgttccgtctagcgtcgtccctcctatctggcttgggaaagcttcagaggaattctcccttccagaatctagagtcctgctcagtgattttggagaggcatacagaccctctacagattaccgatataactcgcacgctcctatgtcctttgtgcctcctgaagcccgatttgagtcagaatgtggtctttctttttcagctgatatttggacactcgcatgttccatctggataatactcggccagcgccccttattcgaggacatacttgccacgccggacgatatcacagccgagcagattgatactcgggggaacttacctctacggtggtgggagaaatgggcggcgcgccacaaatatttcgatgaaagtggaaaaccaaatcaaggtcgacaagtgaggtcttgggaagaccgctttgaaaagcacattcaactcccacgacaacaggctggaatccaaggttttgacttagaagaaaaagctgctgttatgaatatgttgcggtcgatgctgtcttttgagccggaaaagcggccaactgcgcaggatattgtaaaatgcgagtggatggagagatgggcaataccggactttaacaagtctcacttagggggcgccggggccgcggacaattctcgtgatgctgttcccccctagaatatgctgtatgttgtagccgcatgcaaaatctcctctgcacaccgggttattttattttattcttttccacgccaccaatttccttctcttggcctattgaatcttctgccacctctcatttcttcttaaaacacgttgaaattctggcggcccgatgctattagtataggatagatcgaaatcagttgcaccacttacacacagagattctttcttgacccctctttcaaacacactatacatattttaattaatttaccccggtccctatagcttgaccggtatatagaacaatcacattagggccggagcgcccccattagggttaaagagaaaagagccagtgagcaagaatctctagcactaagcctaagattgaaagttgcgggagcaatcgtatgaaagaggtggctggatcactggcctaagcggctagagcccttgcacgaggatcccaatttagtgtttgaagagggctttattgttagtcagagctcttcgcgagactattatacttttttttacttataacgcctaggattttcccgcttaggtaatcacatatgggcgagtagctcaagttatatctaaattacactgagctcagattggcccgtgatataagtcccgccgagtgcgtttagct

SEQ ID NO: 90 - DNA, 3164 bp, Penicillium roqueforti; identical to SEQ ID NO: 42

SEQ ID NO: 91 - DNA, 2933 bp, Penicillium roqueforti; identical to SEQ ID NO: 43

SEQ ID NO: 92 - DNA, 2649 bp, Penicillium roqueforti; identical to SEQ ID NO: 44

SEQ ID NO: 93 - DNA, 2630 bp, Penicillium roqueforti; identical to SEQ ID NO: 45

SEQ ID NO: 94 - DNA, 2551 bp, Penicillium roqueforti; identical to SEQ ID NO: 46

SEQ ID NO: 95 - DNA, 2498 bp, Penicillium roqueforti; identical to SEQ ID NO: 47

SEQ ID NO: 96 - DNA, 2459 bp, Penicillium roqueforti; identical to SEQ ID NO: 48

SEQ ID NO: 97 - DNA, 2418 bp, Penicillium roqueforti
cccccccagattcaatcgatggtaggactgagataggatctggtgtcattgagatggtgtttcttgcctgtctctgcgtttccgaagacgacgatgatgatggaattggtcttggtaatggtgatgttgatggaaacaaaggttggttcgatgatcttgatgagtttggtgatgacaaagcttgcaaaggtggtgatgttggtaaatggatatctattgggaaggatcccggcatatgctctctcatccgatccctcggtttgttcgatattggggtcggtggtaaatcaggtgatcccttttgcatagcaataggtgtttgctgtctcccactttcttcttcttgcaactctctttctctatcatctctctgttgatcaccattatgatcattttgacgatcgtccttatcatcaatctgttggttattcccatgtggatcaacgccttgctgggtatgctcagcatcatcgtggagagctattctagcaaccgatagtggcatttgcatttgacttcctagctcagcctgagcttggtccattgtcaataccataggccagtgtattgcctctatgccgtcggtcattatgctaatcgcgtcttcaaattccagtttctctgacgatttgtattgtcgagattcatcgaacacggcatccctcacgacgtcgactcttccattctttccacctttgtgcgggaaccaaattctgtataggttcttcgacacataccccaccagatatccaatttctgcacgaggtgccatcttttcggattggacacgtttggaatcaacaattcgtgagtatgccaaacacccatatacccttatgtttgataggttgatcttttggtacttgatcccatcaggtgcggcaagtttcatgagttctaaccatggtatgatccattggttttcaatctttgttggaaccctgtttgcaatatacgctgctgcgtacaccgcttctgtccacatagtcttcggaagatcagtatcgttgataaaggttcttgccattttgacaattacccctcctgatctctctgcagggccattcatttccggtaggtctggtggtgagtgttcaataacacatccttcggcttcgatcatgctttctacctcgttgcctgcgctccgttcattgtcatagtggaaaactctgactctgacatttagccagttcttgactagagcgataaatttcctaaccgccatctgacagtcgttcttcttgacatgcgtgaatacaaagtggcacttgattccgtcaaggtaaaaatgtgttaaccaaacatgtctgttccatgctggctgattctgtactaggtcgaaatgtacacgtcctaggatgccataggtcgtgccgatccttctccgagatatctgctttggtgcgtctgctagctggcaagcttcacatacctgattctcagggttgcttccagtaatcatcacaccttccgtcatctcagagagtttttcaattctctttttcccaatgtggcctaggcgtctatgccatgtttcaagtgaggcctcagattctggttctctttctgatcttttcaatgtagcaagtgctaacgaatcattttgtgtttgagggattttaaaccctgatcgaaaacccgggggctgtgataaccacgagagattctgttcctcatgcgttttatacagcggggttccgttcttctcaatccagttcttttcaaaattcaggaaagcacctgttttcttgaacataaggttgtgagcaataaggttcgtgtggaaatttggagagtacttggcgttatacaaagtcattttctttgtctgattggtgactggatcaatgccattgatttcgacttttccaattccggtaaccgttgatgctgtatcaccgaccttgattgtgctctcggtttcttcgaaggtaacaaagaggttgcggtcgttgcagacatgaacttgtgcgcccgtatcaaccagccatcttttgttcattggcatggtttcgtgggtttggaagacagcgtctggagtttcttcttctgttgcgaagaatcccaattcttcgctttgtattgtcgcatttgcttgctgacttctgttctttctaggcgctgttcctagttcttcgtgtcgtttgtcaacatacgctttccacgcaggatcctctttcattgctttgtcccaggccttcttgtattctgggtcttggttatacccttctggcatcatctctgggtaagcgccccagcatttccacgctgggtggtcgtatttgcctctggatccacagggacattttttcctgaagaatggtgtatcgtttgtggatttagctcgtttgctatttccagttccactattctcattggtggatactggctgggcttcttgatgtccttgccagg

SEQ ID NO: 98 - DNA, 2364 bp, Penicillium roqueforti; identical to SEQ ID NO: 50

SEQ ID NO: 99 - DNA, 2230 bp, Penicillium roqueforti; identical to SEQ ID NO: 51

SEQ ID NO: 100 - DNA, 2179 bp, Penicillium roqueforti; identical to SEQ ID NO: 52

SEQ ID NO: 101 - DNA, 2150 bp, Penicillium roqueforti; identical to SEQ ID NO: 53

SEQ ID NO: 102 - DNA, 2101 bp, Penicillium roqueforti; identical to SEQ ID NO: 54

SEQ ID NO: 103 - DNA, 8605626 bp, Penicillium roqueforti (residues 1-1,721,126 of 8,605,626)
  misc_feature (89143)..(89590): n is a, c, g, or t
  misc_feature (91422)..(91652): n is a, c, g, or t
  misc_feature (329881)..(330017): n is a, c, g, or t
  misc_feature (430768)..(431099): n is a, c, g, or t
  misc_feature (461651)..(461667): n is a, c, g, or t
  misc_feature (496410)..(496589): n is a, c, g, or t
  misc_feature (532013)..(532107): n is a, c, g, or t
  misc_feature (539763)..(539898): n is a, c, g, or t
  misc_feature (569547)..(569751): n is a, c, g, or t
  misc_feature (649064)..(649200): n is a, c, g, or t
  misc_feature (691125)..(691187): n is a, c, g, or t
  misc_feature (866510)..(866674): n is a, c, g, or t
  misc_feature (1032466)..(1091865): n is a, c, g, or t
  misc_feature (1092552)..(1092763): n is a, c, g, or t
  misc_feature (1210196)..(1210408): n is a, c, g, or t
  misc_feature (1240554)..(1246826): n is a, c, g, or t
  misc_feature (1247753)..(1253685): n is a, c, g, or t
  misc_feature (1258304)..(1372303): n is a, c, g, or t
  misc_feature (1374137)..(1374545): n is a, c, g, or t
  misc_feature (1457544)..(1457830): n is a, c, g, or t
  misc_feature (1505357)..(1505529): n is a, c, g, or t
  misc_feature (1513228)..(1513390): n is a, c, g, or t
  misc_feature (1624050)..(1624251): n is a, c, g, or t
  misc_feature (1669160)..(1669365): n is a, c, g, or t
  misc_feature (1761228)..(1761454): n is a, c, g, or t
  misc_feature (1817775)..(1926074): n is a, c, g, or t
  misc_feature (1933175)..(1933425): n is a, c, g, or t
  misc_feature (1963987)..(1964364): n is a, c, g, or t
  misc_feature (2150522)..(2150620): n is a, c, g, or t
  misc_feature (2196752)..(2196960): n is a, c, g, or t
  misc_feature (2250746)..(2250802): n is a, c, g, or t
  misc_feature (2391558)..(2391849): n is a, c, g, or t
  misc_feature (2493588)..(2493819): n is a, c, g, or t
  misc_feature (2532194)..(2532471): n is a, c, g, or t
  misc_feature (2536340)..(2536581): n is a, c, g, or t
  misc_feature (2786627)..(2786883): n is a, c, g, or t
  misc_feature (2859585)..(2859876): n is a, c, g, or t
  misc_feature (2873996)..(2875100): n is a, c, g, or t
  misc_feature (2881617)..(2881922): n is a, c, g, or t
  misc_feature (2897171)..(2897349): n is a, c, g, or t
  misc_feature (3050746)..(3051470): n is a, c, g, or t
  misc_feature (3057261)..(3057512): n is a, c, g, or t
  misc_feature (3069611)..(3069986): n is a, c, g, or t
  misc_feature (3075842)..(3076216): n is a, c, g, or t
  misc_feature (3304906)..(3305003): n is a, c, g, or t
  misc_feature (3318192)..(3318516): n is a, c, g, or t
  misc_feature (3502503)..(3502617): n is a, c, g, or t
  misc_feature (3537788)..(3538371): n is a, c, g, or t
  misc_feature (3783217)..(3783431): n is a, c, g, or t
  misc_feature (3992070)..(3992188): n is a, c, g, or t
  misc_feature (4004970)..(4005233): n is a, c, g, or t
  misc_feature (4027160)..(4027360): n is a, c, g, or t
  misc_feature (4058285)..(4058431): n is a, c, g, or t
  misc_feature (4267035)..(4267072): n is a, c, g, or t
  misc_feature (4352538)..(4353000): n is a, c, g, or t
  misc_feature (4361537)..(4361689): n is a, c, g, or t
  misc_feature (4393455)..(4393688): n is a, c, g, or t
  misc_feature (4451187)..(4451324): n is a, c, g, or t
  misc_feature (4461216)..(4461462): n is a, c, g, or t
  misc_feature (4480922)..(4481040): n is a, c, g, or t
  misc_feature (4533587)..(4533724): n is a, c, g, or t
  misc_feature (4589847)..(4590075): n is a, c, g, or t
  misc_feature (4668669)..(4669001): n is a, c, g, or t
  misc_feature (4736843)..(4736937): n is a, c, g, or t
  misc_feature (4766465)..(4766662): n is a, c, g, or t
  misc_feature (4834245)..(4834552): n is a, c, g, or t
  misc_feature (4927235)..(4927808): n is a, c, g, or t
  misc_feature (4944816)..(4944966): n is a, c, g, or t
  misc_feature (5082236)..(5082384): n is a, c, g, or t
  misc_feature (5112277)..(5112998): n is a, c, g, or t
  misc_feature (5314355)..(5314548): n is a, c, g, or t
  misc_feature (5372288)..(5372715): n is a, c, g, or t
  misc_feature (5458669)..(5458780): n is a, c, g, or t
  misc_feature (5479980)..(5480153): n is a, c, g, or t
  misc_feature (5535122)..(5535136): n is a, c, g, or t
  misc_feature (5567270)..(5567409): n is a, c, g, or t
  misc_feature (5598490)..(5598703): n is a, c, g, or t
  misc_feature (5726526)..(5726604): n is a, c, g, or t
  misc_feature (5743037)..(5743505): n is a, c, g, or t
  misc_feature (5807199)..(5807285): n is a, c, g, or t
  misc_feature (5919535)..(5920213): n is a, c, g, or t
  misc_feature (5921527)..(5921833): n is a, c, g, or t
  misc_feature (5942409)..(5942688): n is a, c, g, or t
  misc_feature (6010874)..(6011169): n is a, c, g, or t
  misc_feature (6324695)..(6325013): n is a, c, g, or t
  misc_feature (6397105)..(6397216): n is a, c, g, or t
  misc_feature (6604362)..(6604532): n is a, c, g, or t
  misc_feature (6843301)..(6849052): n is a, c, g, or t
  misc_feature (6859407)..(6860047): n is a, c, g, or t
  misc_feature (6914764)..(6915551): n is a, c, g, or t
  misc_feature (6918855)..(6923725): n is a, c, g, or t
  misc_feature (6950174)..(6950310): n is a, c, g, or t
  misc_feature (7009778)..(7010015): n is a, c, g, or t
  misc_feature (7088368)..(7088591): n is a, c, g, or t
  misc_feature (7280661)..(7280840): n is a, c, g, or t
  misc_feature (7435020)..(7435145): n is a, c, g, or t
  misc_feature (7579716)..(7580036): n is a, c, g, or t
  misc_feature (7597713)..(7597862): n is a, c, g, or t
  misc_feature (7638927)..(7639043): n is a, c, g, or t
  misc_feature (7648137)..(7648344): n is a, c, g, or t
  misc_feature (8007031)..(8007217): n is a, c, g, or t
  misc_feature (8052759)..(8053224): n is a, c, g, or t
  misc_feature (8128886)..(8129301): n is a, c, g, or t
  misc_feature (8133596)..(8133784): n is a, c, g, or t
  misc_feature (8187871)..(8188020): n is a, c, g, or t
  misc_feature (8239554)..(8240025): n is a, c, g, or t
  misc_feature (8245462)..(8245573): n is a, c, g, or t
  misc_feature (8304738)..(8305328): n is a, c, g, or t
  misc_feature (8313694)..(8317811): n is a, c, g, or t
  misc_feature (8345163)..(8345264): n is a, c, g, or t
  misc_feature (8407543)..(8407749): n is a, c, g, or t
  misc_feature (8424434)..(8424559): n is a, c, g, or t
  misc_feature (8481328)..(8481551): n is a, c, g, or t
  misc_feature (8596939)..(8597185): n is a, c, g, or t
gaccggacgcggtgccgccgctgcctttcgggcccgtcctacgataatcattatagggggatttcttacgtatgggttcggatgggtttggatttacaggactatgaggtataggaatgggctgattccactcttcacaattagcatctatctatatactctgggagagctcccgctcggcgttgggcttcgagttcttgcttaagttggatgaaatgcctgcatagtcatacgcaactagttagactataacaggttaattgacctttgattcatcgattgataaggctctgtgttttatgcttcttcgaagaacgtggatatataattgttgtattttctcaagaccaacaatattatctttttcggcggaaggcattgcgcagacttctgggcttcccttccgatcccatactgattctttgccagaatgtatacatttcgtgaagactgcattctacaggatattaatgctttttctgtaatgtagaaaatacctggaaatggttttcatacaggatttctgacagcagggcatttaaagaagtgtgaattgggcctttacagctatattatttgtaggcgtttacataaagaaatatatttgcgacagctgtcattcgacaatatatgcgaccgatgttagtagcgtcagtcacaagaaataactctgtaggcaagggacgcggcagaagaagtttcagctagcgcaacacaggcaatatatgtggatattgtacgatgaccaatcacctggaagcagatttcaataagatacaagatgagatgaagaaagctcagttcaactcgagagtaatagatgttttccactcaggactcgcatccagtaacagccatgcagccagcaagcaagacctcaaagaatcgcactggcaagaagagcagcaaagctgccaaagaggccgcctaatcatctaacaacgttgctaacctgttcacataaactctccacacagtacccattctcagtcccaacctctggacataaggaattggatatgcggcataggtttagatgactatatggtttgctctgatcagctttcatcccaggcacggtggcaaaatcacaagattaccatcaagacagctttgcagaccgtacaaatcgacggcttacggtctgagaggaagcaagatgcagcttgacgaaggcagtaaggccggggcccggggtgtcatcctggaaaacaccatgtacctaacctctcaatgcaaattagctaaaaggccatcatcatcaatcccgcattgttaaagtattacaagtatgaggtataatattgcatgtgaccagcgtttgtgtaaggaaatgttgcaagtgtatggttacagtcttttaaatacgtgaggggaaactcgcttgtgttgagagggttccaagaatattgaaacgcacaaacgcacaacgacaagtgagcagatatttcatccagtgcaatcgggccgaatcccaaacatgctgtgatacggagagcatcgcatggtttctattaggttgggtaagccaacgactaagtacgatctagtacaggagttgttgggagtacccaagtgtgcagaatggtccgtaccattggcaccagccccaagacctttggaaagccaagcatggatttcgacagatcataagttttaacaggcgttgaactgttgatgcgcgatggtagatggtaattaattcgctctgtatatttctaactactcccatataccctgatccatcctgatccatcctcattcatcctcggaaaatctactgtttttaatcaacctggggagcaggacttgcccatcggaggctctgcgcaagtactctcccaacaacacactcattcctgcttgttcggcagcactcacccactcgtcgagtgaaacgacctgaaactgttggcccgagctcgattccatcaagggcatgatttcatcacgtccaatcttcgtctcgccagattcatacagatacgtcacagcctccgtagtggcgataccagattggtaaacggcctcgaggagttggcgtgcggccgactgtacggaaaccagatcgaagactcctgaccatgagctcgagtctggcactttctgggtttctttggtgaaccgcatgacattacccataagatcaagttccggcgcatcggtaccggtgatgctcgatgggcggtgtatccataccggcagaccaaatcgacggttgacgtgctcgagatatatttcgctcacccacttggcagcgatgtatccatctgttggtcgagatggaggaggatatgacgatacagacatctcgccgaagctttcttgaccagtaagccgtgcaacaccagccgacgaaacaaaatgtaatggaatacgccggggcaatgcaagtttgacgatttctttcgtcgatgccacattgatcagcttgagagtctgatatgttttcatgaacgacacatccgcgccattgtgaataacgatgtctgcacaggagaatatggatttgatctcagattcagatagtcctagttgaggagcccccagatcaccgtaatgcaagtgaactttcgggtgggaaaatagttcagataaacccgatgatcgttttctgacagcaagacaatgaacggacaaaacgttttcatcatgtataagacctcggaggatttctttgccaaggaaacccgttgcgccagtgagtaccactgtcttgacccccgaggcgataatatgggtgctctcataattcagaggtggagtgaggtccgttgcgacttcaatctccgcatcccaattcacatccggctcgagtgcggggcgagatatatcttgaattctggccgccattccacgtagactgctggcttcgaaaagttgatacaatgccatagatgtaccgaacttctcctggattagaacttgcaggttgacaagagcgagggagcttccaccaacgtggaaaaagtcagattctgaatcaatcgagtgaaagctgctgagttcgcgtggtagtgcctgtcgccagagctgacgcaatgattgttcaaatgccgtgagggtgctgttgtccggcggctgggatgaaataaatggaatggaaagtgcgctgactgcgacgcgatcagtcttgcccgaggtattttggggaatgctttcaactggaatgatagcagcaggtttcatatgaggtggcaatggcagctcctgggaaaggcgggcgagaaattgaagtatattttcagattcgtgtgtggcagccattataacaaaggcaacaagaaattgatcgccctcagattggtttgcatctaaacgaaccgataccacagcttgtgtgatagctccagctgaagaactgacgatcgccgtctcgatctcttcgatattgatgcgaattcccctcaatttgatttggttatccccgtccatgcgcccgaggagaataagaccaccatcgcgattgagctttccgcggtctccagtgcggtgaattgttgtccagtctttctcttggaaaaatttgcttgcgtaccgatcacttgaaaatcgttcggctgttttggtgccatcaagatagccctgggcaactcctgcaccaccaacgaccacttccccaggaattccgatgggaacagggttcaaggtttggtcgacaatgtaaacggagtagtttggtagtgtataaagagcttgcgcaggggatgttgatgtggaacccagcaggtcgtacggaacttcactggctgagcatgcaacactgatttccgccggcccataggcatttatcagtttgaggtctggccgatgaagattcttgatctctttgatcaacccacttggcatgaattcaccaccacataccgcggttgataagcgagagttactcagatgggagcgaccataacgcaaccaagcgagatattcggtgggggtcgcaagggtgcacgtcacattctctgatgcgatgagtcgcgtgagagcaatgggatcccctcgtgtgagatcagatgcaatcacaagggtcgccgcagagcatagagagaccatgatctgccataaagacgcatcccaagcatatgatgattgatgcaggatggtctcattcccctgcttaagttcccagacgacactggatgactgaacgtggtgaacatatgctgaatgcgcaatcataattccctttgggacaccggttgatccgctggtatacatgatcaccgctgtctgacttgggacagccatgtttcggatggggcgtgcagtagaggcgtttaggctacatacgtcgataggttttgccgtcgtatgcagaagcgtatagtcaggcatagattttgtatcaaccaataccatcggtgcttgtgtttctttcatgatcattgcgagtctgttcatccccacctttgtgtccaatggaatgtaaacaccaccgacacgcaaaatggccatgagagaacatatccagtctgcacttggagactgtaaaataccaacacgggtgcctgagccaacttcgttgcgtaggagttcgttggcaataacatcgatccgacgctggacttcactataggtcaaggagtttccatcgtggttcctcaatgcgacacggtctggataacgcgaggcaacctcatccaggcgatggacgatagtcacaggccattcatctcgcagctcgggtcctgcataataccatatttagcaaatgacctacaactagcaagggatgattgacttgcctcggcccgcaatcactgcctcttgaatgtcatctttcgaatgtaatttcggccaggtcacccgggttgctggattctggaggaaagaacgaaggatattgacataggaactgaccaggatttctgcatgctccattccatacaagctagtctgggcagacaggtgaattagcgtctcgccggcaccgacattgccaacatctagaccgagatcgaaagaagtttcgccgccgcccaaaagtgcgccatcggctacacaaccacagaagcttcgtgattgctcgaccttgggtcgatagttgaagagggtttggcacagaggattatgagatgcggatcgtggaacgttgagttctgtcaagataacatcaaacggcacacgcgagtgggaaaacgcaccctgtgtgatgttcctgacctctttgagagattctccgaaagattggcctggctgttgagagaacctcacaggaaggaggttcaagaaaagtcccacgctccgtagtatgtcggcatccgtacggtttccatctccgaggccgatgcaaacttccttcacatcaaaaaaccgcagaagaagggtcttccagactgccaaatggaagtggaagggtgttgatttgaacatccggcaacaccggtcaattgaatccgataaactgacatcgagacgaatatgtgcagtatgggaacgaaattgagcaaccttagggcgcatgggttgtagagcaaatggaagaaggggaattgtgggtggaatctctgtatactgggctcgccagtaagcgatatctccagcccaggtgccctcttcgtattcacgaagctgccgcatagtaaagtctggatattgaagtccatcttcagaaaggggttggccttgatatgccttttccacgtctgaccaaaatacttcgaagctaataccatccatgttgatgtgatgaaagccgaagattatccagtgcttttctaggtcaagcgaaagcagctgaacacgcatgacctcgccatcagagaggttgaacacgtgcgccttcatctgtttctcggcctcttcaacttctgccttgtcggagattgcaacatgctccaactgtaacgaagatttcgtccaaacgccttggatatggttccgttcattgtcagtgaaaaaaaatgtacgcagggcttcgtggtgttgtcctgtggcttttacggcatttgcaaattcttgaattctcaggcgaccagacaactcaaatgtcggtgtaatattaaatgcagttttgtcctcaacaagatgctctaggaaccagaaacgcgactgaccataggacatcggcagagtcctttggatttcacgttttgggggtcccactttgctgctgtcagtaaaaacggatgatgaagtgtcatcattgtcttcggaattcgagtctccggtaactaacgacgtcgccgagctgccactgtacgcattcgttgcatcaggaagtgcaaaatttgactccatagaccttgctctggtatctggaactattttatccacgggcaaagtgggggaaggtgttgaagagttaggctggtgcgcctgtgactttacagcctgttctgccatcacattggggatcaaagattctggcagaacttctgcagcagtggccaaaagctcacgaattgacgccgcgttaaagattttcagcaccggcatatccacccccagctccttgaggaaccacgatcgaaggtcaacagcgaccaatgaatcgacaccaagctcatccggactcatgtccaacataggcttgttgggatcagcctgaagggcggactggagcttcaaaacaaagctatctaaagacagctgttagtttcagctgggtatctaacttgggatgcctgtaccttgcaagatctcgatgacttcctggtttgaagttgcctcgaataagcgtgtttttatcaacacgccagatttccctttcttgtctgtcaccacaagtttgctagacttgtagaccagatgttgaaaaattgggttagaaacccaactcttcgactcatcatcgtcaattctgagtccacagcataactcagcgctcccgacacgctccctacaagaaagtacaccttcggcaaacacctcatggaagtcttgttcagacatccatgaatgcccgactcggtaaaggtatgattgctggcccatgttcagctctcgtgtaacgtagccgttaccgacaatcgcgccgatgttgatcgcatgtgctgccaatccacggtttcggcgttgggctgccagactcgccataaacatattcgcggcattataggcaacctggccagggtttcccgtcatcgcagccatcgacgagaagaaaaccataaattccaacgtgtcctctgggaacaattcgtccagtaatatactaccttcaactttaggacggagaaccttctcaaggcgagggagatctaaatcaatgaacattgtgtcctggagcaccatcgcaccttgtgcaacacccgcgataggaggcatggtttcgctgatgttacgatgggttgcttgaacagattcccgattcgttatgtcactgcatgtgttagccaggcgtgagtgattggaaccaaacaagagcttacttggagaatactcggacagtgcatccattcgcagccattctctgcagccattggtcatcgatatttgggtttcgacttgatagcgcgatgtatcgtgccccctgtccgatcatccactggcaaagcgacaaaccgagcccgcctgttagtccaactagccagtaagttttgtcctttgagaatttgacagctttggtagcagggcgaacttggacagcaagctgcgattgaccccatgcaattaaagactggcccgcaagcggagattgtgcgcgaatcaggtcctcaagtcctagaggaacaaacttgtgcatattaactggcatcaggtcgtattgtgctctcgcccaggtattctgcagctgcatagccaattggcctgtatctgaggtgtactgagattgagagatgtttgcagtcaaagtgctctcgctctcaaaatgacagtctgtccgcaagcatgtcctcaggagagtagtcacattagagctgccactcatattgacaaggcgtgaaatattgccatgtagcttacttaatacttcacgccgggtggagtttgggtggattcggatccatggccatgagcaatgtccttcctttgttgtcaaaaggacaagttgcacacccttttctgctgcatatttcgtaaggactggtgctagcgagaagccagggtctaacacggccaatatcgttcctggttgaagctgttggagcatagagagagcaaggaaatgggaatagagggtgagtatcgatcgaattcctagctcttcggaatctccacatcgcaccgtcaggccatgtggcacacgaacttgagagtccagagtatgcgacagagcgaccacacgctcaccattccacttattcttcccaaccagcaagaaataattgtccgttggagtgatgcggacggcacggaggaaagagtgagccacatcaatatgcacatcatccgggaaagagggcgagtcttgaaggtccttttcttcaatttgatatccaatttcagttggtcggatggtcaccacggatttcttacgttcaacctctttaataataagacgccttgaggaattgtatcgatcgttccgaccagagttcaggcggaatcgaggaactttgaaattcccattctctagcagcagctccctctcgttggaccacaacatcccatcaagctggccactctgatcccaaatttcggcggcttccaaatggagcagctttgtagcgataatattggaatcagcgtcataaagcgaacggagttttaggaaatggatatggaggtgagtcatctccatggccaatgtgcgttgaactcctgtgaacatgttgccatagggattctctccctgggcaccgtgtcccacccacagaacattcttgctttgtttgaagagctcttggaatgacctcagattattaggagacatgtgcctgagaacaggcccatccaattcaatcagactgatcactgaccccattacgggaagatttgccgagacgaggtcatctaaagagccagctgtgtagatattgctgtagtggggacggaccgcagtcttcatatcggctacgatatcagcagtcaaggatgttttccctccgatgattgtcaacgagttcacacctagtggtgtatgattcgctgctaggggatcacgaagaaaattgacgcggtgatcgacagcttgggtaatcatgacggagaatggcagaggcgaggttctggaagatgacaacaatgcttcgaaaccagaaaatcctgttttttgcatcaatccttcccatttctcctccgatatacaaggggataaggttcgtccctccttgtagcctaaccaccagcctggtaggccaccaaaaatcaacccgaagcgcatgacatccgagtcggtgagttcgagcataaccaggtacccaccaggctttagtagccgtcgaacatttgtgagggttgcctcaagatttctggtggcatacagggctagaggagcaatgacaaggtcaaaacaaccctcttcatagtcttgttccccgatgtctttctcgatgtccaacaacttgaatgccattctagattggtaatccgagaatctttcacgcgcgttatcgaactgtgagtccaaaatatcggtatatgtgtatgatgtaaatgaggagcccattgcacgaaggactcgttccgaagtagcgccggcgccagctcctgtaataaattagtattgcacacaatttcaaatctgtgtggactaaccaatctccaaaacattgacatgggggtatctatggccgatctgacgagccgtctgtgcgatggtttccaagtatgcgtctattccaagtgttttggcgtaaaattccgctagcatattgtcgcgcatcaggatttcaagtaaattctgatctccgcgaatgacagcaggaaggttctccccaactgaacacagtgctttgatgtcgatacagtcggaatgactatgtagatcagtcagtgtgattcaatttcagtttgttaggtaaacaagagttcaagttctcaccgattcagaattggagcaacatcgtccatggtgtcattggcccattccgcctttgcgaatttatgttttccattagcaacagaggttgtacaatgctccacatatgagagaaaacgtgtatggtcccaagttgcatttgcatgatcgaagtcctggagcgaattttcaaggtttttcaagtagaaatgtgccacgcgctcgagatccacgcctagggaaccctcttggggaagcatgccttcagctttcttaagttgtcgcaaggtgggtctatcaacatcccataccacttccgtgaaaaagggaacatcatttgatgatgtcaatggactcaagggtgtggtatgaagcccttccagttgaaccaaagtatgtctcccgtctgctgaaaatatatcaacatcgccagagagttcagcaaagcgggcatccgtgaccgcagaataaaacggcaaatctgtaccacaagcaccaagagcgacacaggcggttggattgaggcgaagcctgtcaattcgagtgggaaggtaaagggtgcgcaagcgtccatcacctggaaaggaataagcaagcatgatggactgaatagctccgtcaagagaggctgggtgaatgatcaacggtctttcagttttggaatccactgggacagcaatcaaacccgatgcctcgtccatttttctgcgcaagttgaaaagggcctggaaggggccggtatagccaaacccaagctctgaaactgaattgtagaatcggtctgcttccagatccaggaatgagccttgcgggtgggcgtgtggtgggaggatatcgtgcctggggtcacccaaaataatttgtatggcggcagatgcgtgaagagacatgttggatgaccccttattagcgtcagaatgacaggcaaaggacgcagacacgcaatcggcctggacttggtcgatggaaagtctgaaaatcgtttccactcccccgttctcttccaataccaatgcctgtccgatgaccacatcatggaagtcgatcagttgcacagaacccaggccatacttttgaatgatacactcaaccgccgccgatatataaccagctgcagggaataccatttggccttggacctggtgatgtgccagccatggaacctccctagggtgaagatagttgcgccagcgtaactcattgtctgtcccatcggggcatttgacacccagtagggggtggaatggttccttttcagtgcgtattgcggtagatgatcgagattcgtgccaataaacccgatcatggtcccacgaatacgatggaaggccttttatgagctctggagatcgagtgttttgattttgcattgctttcatctcaaaccctgcgaagtccacgacaccctcacccaaggcaatccatagggcgcctagggcggatgagaaagcctcgctgtccttttttccacgatttagggttccggtgtaaggcaatgtctggccagacacttcttggatcgtctgcattgaaggtcctttcagtgctgggtgaggaccaatctccaaagccatgtcgaatggcccagctgcaccaacggcataagtgacagcctgggagaatagtacgggcttgaccatgttattgctccagtacgtgtcggcaagattctcatccacgctgtcaatgttttccccatacacactagaaatccaggtagcactgccactcggtggacgctgaactgttatgccgcacgtgcggatcgctgcgatataaggagctgcgcaggaaagcatgtgatgtgagtgataagctttgtccactttcaacaagcgagcaaattttttctcatcttcaagaatttctctagcctcatcgatcgcatcggcgtccccggaaagtgtgacgctggcggaggagttgctagctgccacgcaaattctgttctcgagggacggcatctcgcaaagctcctttgcatcctcaaatgatgttcccgcggccatcattgcccctatctgtcctccctgggaagttgtatactgaagagaccatccgcggtaataggcaatgcggatagcatcctcttcgttgagataccccgcggcatacgctgcggcaatctccccagacgaatggccaacgacagcagtaggtttcacattggctgctcggagaagctgaaccaacgcaatttgaatcgcggtacagagaggttgcgaaaacgccgcctccccaatacgggatgaaaacttatctttcacaagctcccccctcagcgaccaaacagggcgatgctcagtgggtaaatcccgcaaagaccgatcgagtcgggcgatacaatcactgaccattggcgagctttcgagcagttcagcacccatccttgcccactgtgctccttggcccgtaaacacccaaaggagtttcggttcgaggatacttcctgtttgcgtgcttggtgttattgccaaggacagtactgcttcatccagccctgcagcaagctctcctaggcttgatgcagacaccgacagacgtactggcagagtggaacgtcggcagttcaatgtccatgacaaatcacggatattgacatccgaattatttcgcaaatacgccgagtatgctgcaatgttggtgagaagcgacttttcggaggaggcagagaaattgaatggtaacactgctccggagctgtcatgtgcagcgttctgaccacaggcaagcaggcgcgtatcgaattcttccaaaattgcatgcgcatttgcgccgccaaagccaaagctgttgacactagcacgacgaggggtgttctctgaaagctgcggccattctttcgcaacttgaaggatttcaaggtcgttgtagaagggaagtaccgtggaactcaactcattgagcaataggtttggtgggatgacagcatgttgtaaagcaagtgatgccttgaggaccgctgctaatccagccgtgccctcagtgtgcccgatcactgttttgattgacccaacatacaaggggtgctctcggttactatcgcgctgatacttggctgcttgtccaaagaatgcagtactgatggcctccgcctcgactgggtcacctgcaggagttcctggttcggtcagcaaagccctacaacactcggtttcaccttcatttcagttataacttaccggtaccgtgagcttcgaaatattgcggccggtcggtggggttggaaagatctagtccagctcgggcatacgtagtccgaataaggtctgcttgagccatagggttgggcatcgtgattcccttggtacgaccgtcttgattggcacctgtctctcgaacgatgcattcgatgtgatctccattcgccaatgctgcacttaatggtttgagtattatggcagcaattccgtcaccgcgtgcgtatccatctgcatctttatcccacatgcgcgagcggcccgtcggggaaagcatcttcagcttgctctctgcgatatattgctccggtccaagcagaaggttggttcctgctgctaccgcaacatcagtctcgccacttcgcaggctctgtacggcctggtgaagggcaatcagactagaagaacatgccgtgtcgatggtcatggaaggtccccgccagtcgaaaaagtaggacactcgattggatagaatgcttcgagcagttcccgacgcaaaataagttgggaagttctgcacatcccgacccaacatatccgcatagtcattggtcatcaaaccaacatatacgccggtgttagacccttgtagcttttccatgggaatgccagatgtttcgagtccctcgtaaacagtctcaagcaagagcctttgttgcggatcaatcgagtttgcttccactggcttggttccaaaaaattgggcgtcaaacagtcgatgatcgtcggacaacaaataggaatgtcgaacattcgttgtgccatggtgaaggccatcggggtggtaaaatgctttggtgctaaaacggctttctggaatctcgctaaggacatctcgtggtgatctgagcaagtcccaaagtttcgagggtgttgttgcatcaccaggaaagcggcaggcacttcccacgatggcaatcggttctccggtgtgctgaagaccacctgtcattgtgtagctcgggtttcactgactctgcacaggctggtacgatcaatgtgtgactccgcgtatttctatgaagggtctataggatatcaatcatggacaatcgggacaagattttctttgcaacattcacactctagttagcagcgatggggagcggtacatatcattgtgccgatgctcgccttggttgtcagattaggatagttcggacatccaatctcgcatcagcttgtcattgttttcagctggttccgactccgaggcctgtctccggggttgtgatgtgaaacgagacaaatcatgatgtaggtatgggatccaccgggtttttgccatgtgtgcagataaacttcctgtgttttctcacttcatgttattctagaaatctagaaatactaggcttccaggggtttgaagtccggctagtttgaaatctcaagaccgagtccgagtccgagggtcattgccctgttgcatttgcatgttcgagatctcagcaagaccatcaaaccatcgatgagtcgccagcatggcgtgcagggatcgtaaatatttgtctcatggccaatggagtctactatattgcgatattgcacaacaaggatccaaggagaatatgcgcccgactactctttttcctaagtaattagcaatcggtaggttcagcatcatgcttcgactccgagatcaataacatacctagtccatgttctaatactagaacccctttttcccagatcaccactcttaggttcgcaaccacatttccatgtgccatggatcttggtcggtttgagtcttgacctcagcatattcgagtttcaactcctaatatccgatgatggctgcatattgtaatctgagcggtcagcacgtggaaaatggacgtgctctagacagtttgtgttgtctgcttccctatccctctctaggcaggaggtaaaaatattccccaccccgccctgtcttggtaatgctgcatgcagcagctaggatcaggataggcaggaggtgaaatgaaggctcgctggggacaaagcgcacggaagaggtggggaaatagaaggacccttggaaggtagttacctaagagaaggctgctgactcaggtatcaactgtggcctgaggcctctatttctttcacttatcggaatgaactgcccagatgggaataagacactctaatcacttgccaatagtatctttccattgcatacattggactgcagatagcgactgtactcaataaatataaacaaattcatcattctcccggtctgtcagatcctgaaacgcattgtccccaacttgcacagtctcaagtccagcttcctcgatgttatcctgcatttcgtgatagtcattctgcatcgaaacatcaactatttctgctcttttgccattttgtacacgtcgacgggcttgttgtttgttgaggaaccatagattagcccactggataagaacaacagcggccaaggtgctgaagattccgagacatgcgcgcaggcctgggtgataggctggcttatctttctcgttgaatagcaacgggccaatgatatttcctgccgagcttgctgcattgtacaaactcatgataacggacttcttggtggtgcctgccgtgttgccgatgatccatgtcacaatcaatggattgccgccaaataagaatgcgagtagatagtagccagcaagtaactggccctgtacagagttggtccgagccaccgcatacaaaattgcaagcccggctatcacgggcagcatgaacgctgcgatgatagcgctcttcaaacgagcggtttgggcaagataacttgctagcagaatgatgaggaattgcagcgcgccaaatggcatggtcaacagagtggtcctgtacttatcgtagccaaggccgctcaaaatcagtggaccgaagacgttgttcacgctagcgccaatgttgaggagcattgccattccaatccacagatatgttttgggctctaagcacgcctcgaggacgtgattaaatttaaactcggtgtttcctgttccagtctggttggctcgaagtcgctccattccttgggctttctcttcctcggtgaggaaccgagcggtcgagatatcgttgtccaagcgccagtagacgattggggcagatgcgacagttatcaggccaacaacaagaaatatgctaaaatcaagtcagaatataccactctcgggggttgattggtttgatttcctacatctgccatgatttcagcacgtctgactctatttgtgccagcccgtacgatagagcagctgcaacgacggttgctaggccatttgtgctataccatgcagcgatccgtatcggttgctctgcacgacggtaccattggctcgtgataacaccaaagagagggagacacccggcctcaaataggccgagaaaaaaccgagcggccatcaaggagccgaagttgtggcatgcagccatgcatgtctgcgcaattccccacccgaggcatagcactggcataagaattttgtgaggaaccttgacaatcaggtatgaagaaaagggctgccaggcaagttgtgcaatgggtccgatggagccgacaagcgaatattcgttgccgacaaggcctgtgtctttctgtaaaccgaacgttgcaccgtatcccaaaactgtcttatcgaggatctgcaagaagtagacccaggcaagcacaacaagaatagtccgatcggtcttgcgacagatgcgcttgctgtcctcttcggtcaaggagacacgtacaataccactgttatcgatgagtttgtcccccttctgctgctctgcggcttcattgtgaacaacatctggtttggacatggtgggttcttccatcgtaggagaatatctataccatgatcgtccctatcaaggcatatatatacatatgtacggagtagggtcagttgccgcgcctcacgtcattcggtgaattctaggtgtttccccatgtttccccccacgtctccgcatgcccccacgaaagtctaacgcgcgcagtccacattcgccaagatatttagcgaaccaacgttgccggagattgattagagtttcctgtgtcttccaatcgattagaatatccttgccactttccatggacaacgcattgtcaagcttcggggtggagatccctattcggacatcccgtgattaccgagcctaaccgaaactcggggggtgggggtgagcccttgccgagggggacaggaatgcaggaatgaggccataaattacctctgcactttcttatttgacagtcggctaatgggagaattgtcggtgactgcgctctattgccgttgtatattgttgcaacgggtaaagaggtaagatgccgaagactgactgaaatatgtatctgagaaataattggcgcctgatgagttatttttccctctcgccggcagacaatatctcaagatattgaacaaatatgctttggattatcgctcccagaaagggaaaatcaaacgccgattactatctccacgcctagtttagagccctggaaagagcgaattcaagaaaaagacttccccaaatggacgacgcatgtcggcatatctacaaagcccgaaattcatacatttggcgcaaattatgcaacataccgcgaagcatagccacctcacctcccatttaacgtcgaaaaaatgttgatcacgttgatacatgccggattgcgagagtaccgcgccctaatctttgagtgaatcatgaccccaatttttgagcgatcggtaactcttgctattcgtgtcgtacttggctcgctcctcttgcgctaaatgacgcttgcagtaggataccacgcgacgcatgtggtcaatgtcttgatcgctgtagtcggacgggttctcgttgggattgtgctcgaggatccgcacaatccttcggccactatcactatgattaacgctcgtttcttttttccaaccactggaactctgcaatcgagggcgaccaaagtaagaattactgacctttcgtggccaattgtttccccggaactgcccgcccaacccgatgtttgtgattgctcttgctcaagccaaccacgaagctcgattggggtcatgttcacgagatcgttgaattcactgctcagtttgtcaaaaaaatttgtttatcaaagctggcaatggaaagatacccaatcacggtgtctctgtccttcattgtttccactgatgaatattggaattttggttagatactacgagtgatggtaatcactattggcacagtggtgagtgattttgctaatttgaagttcagtttgacgtcatagcggcggaagcatgttgctatgtcacgatgacaaggctggttgtagatacggtggacacctggaatcatgaagcagaattgctaaattcttagacaaatcggacctgctttctaaattgaacgaaggagattttctcgcgagggcaagtaaagacaatgccattaccacggccagaacaatcgaccatgcagatgtgcgcaattaaataacaaagcattgctcctttggttggaattctgatcgctggccatctcatatcgacttagatgtgtccaagcccattaagaatggttggtctccatcgctttccttgtcttttctttttcctaaatctgacgattaaatttaaccaactatgcagtcagcgtcaatcatttgaataaaagatattctgaattaacccaccgaccaagcctgggaccattgctccactgggctttgatggttctcatccttttgaattgggcgaatttgttgttttatcttgtaataatgttgacggtaacattgccgcctcgggaagtgatcggctcccggattccagggtgagttagtcaccccgccgccctaagctgcccactgagcgaccctgagctgctcagtgagcaacctgatcgctcaccccggtgctctcccttcaccctccgtcttgccttctagctttcgcctgctccgatggtaaccgcactgcctaccggtgttcctgggagttctggtctggagatgacgtattcccacgtcgctacagtgacttgctgtcctcttcgaactttccatcggttgactcgatcccttcggcttgcatgagatattcagtaccacctcacctctacaccctctcatacgttctctcgctaacgctgccgacaccacccagcaaacgatccacaaaaattcaccgttgtcctcgttcctccatttactgtgccaatttgatcccaggaacaacattcgcaccagccttcgggcaacctctttttgtgtggtatacctaggtctcgaacaactcgccgcgccgtgtgacgcaagtcgacgacatcggctgacggatctagtttagtttcgggctagatatctgccactgtgaatgaattaagctagcattcctaggaaccctttcctataactgatccctcgcacctagaaatggctctgcgattggctgcagcgaatactggggccttgtcgatagatccagaatctatgccgattctgtcaacaattcgctgctctatctcacgggctgattgaaacgatgaatcgaaacaaataaatagtcccaactatccctcctttgcagcgtttgtttgaaatatcatcgaacgtgaattttactgcctcctgctttgattcccattcattcagaacctcttgaatctacctaccatggtaacgctgaaccatcaacgattttggcagccattaccaagagcttcagtgagacgctcttcaaccggctcagaaacccagactaccgatgtagtgaggcaatcggacgccccagaagaaagaaatgaagcagactacaccctggggtgtaatgtgccacaagaagaacgcagtacattgagtctcggtaagacatattttaaacaccctcctcccatgccccttggaattaatacggtctctccaatcctagaacccggcgagccccctcgagccaattcgcctgaactctatctcaatgatgcagcatcagccgctggaaattatcctgactaccccgaggaagtcgctctttatccttcctcccgagatactgcctccgtgactggcttagaaggccctggtacgacgagagtcttcgatgtctttgaggacgatggcaccagacaaagcgatggggggtattacagagattgtaatccaaacgaaaggaagcgagctttggaatattcaaaaacatcctctccgaaacgatgccggcaccggacttctacggtcacaaatgcgaacaagccgcgaggaagacgagcacataaaccaggagccggaaattcgccaagcgaaatcacagagggcgattccgcgggcaatcttgcaggcctaaggaatgcgatcggatatttgaagcgcgcttacagtgtagtcactgctgaggccaaattttctgacgacctcacgggtgcaggaattctcaaagagaatcttgcagtgcttcagcttgcaacaaaaacgctacaacacgcatacggcatcatcgcaacaagcaccacagcaatggaaaattcagtgcgagaggctacgactgtaaaaccacggccaggttttacccgcaggaagtggacccccgaagatgggcgtcgactcttgaggttgaaagactctcaaaagctgtcatggagtagtattcgcgattcgttccccgaaagaactatgaatgcactcaggagccaatactctcgggagacttccaagcatttggaagctttttcgagtaaggagagccaatcggtcagcgctggtcggcaaccaaagtacacatcaaagatccgaagaagccctaggctaggcaaacctcaccaggtcaaaagtatgaggagcgaagtcgagcaccaccgaaggtatccctcgcgtgcaaggaatcattgcggtgataatgcattgaagttggattccattgatccccgactccgtgacctcggtaatgcctaagtccgccccactgtatttttttctggtggtaagaccggcataggatgtttggacagcaatatatcttctgcaaatgcgaattacggtcaatgctacaatgtgattagagcagaaggttctgtttccggagttctttatgtagataccgagcctatattcaacgagttgagacttcttgcaccgattacatgatacggttttttggtgcagtagaagtccgtatagggacctgctagagcttacgtagtgtagagactggtatgatctcttcaatatgcacaacaaatataggtcaaaatcttctaccttccaaaattggcgctagagacttatacctacgaactgatcttggaaggcgattgactacaaagaattatgcagcaaacgaaatgtatatgcattgaaaggtgacattcgagctggccgtgaacctctcacgtgtttttattagcttccaataatagcagatatcgtcaactatctctaccgagatgtaacgcgcagaatgaaaggttgtttgcgatcctgggaacacttagcctcctgggagtgctaatagtcgctgtcagggatatactttaagcataaaggatgcatggagatgatctgcgggacccacattgtgcatatgggttcccctgaacgcgaggaagcctgtatctagagtcagctataattgttcaccatattggttattcatgacaagacacttccatctatacgtatacgagagaccctcgcagtcgctctcaggaacacagtccaagtctcccagaagctgatcaaatgcatccacgctttcacttcgtaagactccttgagttccgggttcttcctaacccaatttgaaataatgctcatgagaagcttatctgcggttatttaaaataatgcctctcatggtagaagtgtttcagaatatacatatcaagaatctatggagtaggttcatatttaggtttttattaatccttcagcagagacatgggcctgtgctccccttgaggactttgcccctgatatttaatggctagctcgtccatcttcatttgaatcggctcagggtgatttgactccttgttctgtgagcgtccaataaacttgaattaacgagtgaaaacaagaggagcagcttactatttgttctgtagatagaggccactctttggcgttcgaagtcaacgtgtatagttggcctgtcttcttcattcggagaacgaagtggatgtcggcatcacattctgtacaatactcgaaaatcttctttaatagtgtctccctccttctcagacttttttgatttccccttctggcatgagatgttttgaacttgctgttggcgatatttgtaggcaatgatatgtttaccaccggagagggttccatttgaattctatccgctggcatcggtcaggctgtaaatactttttgttacctaggatatgatttaatataaggtgcataatgtctctccggctcaactaacaacgacaatgacatttattagaattgatttgtgttgatagatggatcctgtggtaaagcaacttaagctgtcatgtcttcaacgcccatgacttccgacttgaccaagcaagtacccgttgaatttgaacttcatttagcaaaaatcacttaaacgagggccataaaaccatactattatcactttaagggtttatattagctcagattgaagataggaagtgacagaaaggcaaagatcgagccccatttgaggtcaaccatcacctgctctcatgttcggtagataacgttcaaatagcacttgtatgtacagtaccataaggacgtgtaaataatcttctagattgagctgatatccagggtcctgttctctatagagatatgactgcttgtatgtaatgccatgtgcctgtgctattgctatccatgtcaccatgtgtcctcttgggtagactctagaaaattggtctgaagagccacattagaatactcaggattaataatcacctattgctactagagcattctgcaaaaataccatcttggaaatcatgattgtagccccttcactgtgattcacaagtttaattccgctggtcttgccttgaatagattgcatgtcagaaaattattccgcagtgacagcagattctattaaatgacagttattcaagtggcaagccactatttgagatagataacgccaaacttgagtttctataacctctcaccagaggtaagcgaagtgggatggaatggtttgacgcgtcaaacttttagcacagcctaggctgcactgtattcagaatgtactggaaatccggtatcgattgtcatttgtgtatcgtgatttccactctcgtgcgcattactggcatagccacagcgctggtaagctcagccacaattatatagattacccccctcgtctgtaatggaaaaacccgtatcgctgtgttcgatacacaatttcggtaccaacttcagcctggttcataccatattgcaacgttgaacgtggccacactacacattacgattgcctctgaaaatggggtctaatttcgtagcaaaccactatgcctctggactgtactttggatgagacgttatgacctacgccaatgcctctgttgccgcccgcattttattttcatgtattctatccagagcgaaccgttcctagggatgcccatcagaattggtcatgaattcgtatacttagttcgtctgtcaatctagtgtatgtctctctatgttatctccaaaagagaaatgatgttcatcgtgaatcagcaagtcacctcgtcttttcgagttatcttttactacaagttaattttccactgcgctgtaaataccaatcttgtcccggcccattgcatcaccaactccaaacccttggtgtacaactttcgagaacattcccatcattccaaggggcaaatcaaggtgtgtaatattgccatgccacatcaattctggcgacctgactggcatctggccgagctttccatacatctttagcccagtcagatggggctattggtcttgtaagtcgtccgtttgcttctaatttagtgctgttgagaaatcggaagcttcatttaaacatgttcttcgagatttattcgatgtgtcactagggattgaataaacgggggaggtggacaaggggctattcaaaaccgttgaagttgggggtgttgaagagcgttagaagagacatatccccaattttcccgaggcccccagaatcgaacgcctctctggccctcccgagaggcactaaaggcgaggggagcgttgaaagttgagggacacatcaatgacgactttggcatcttccttgtggcgttgaactaggattgcttggatttgggggtaaccaaacctttgagaattcagataagtgcggtcaaagttgcactcgcttaaacaggaacgagctactaactgcgacgtttgctgtggctaattcggttctttgaccaaccggcagattgctatcctaaaggatcgccaccaccaacaggtggttaagcctcggttgtctcaaccatgttgtgtaaacttctgttctggatcacgtcaacgcattaaaggtgccagcactatcttcagtcttgtccaaggcttaattctgctaattctacgtcggagagacccggtgatatagtacctcaacggcaattatctcaccccacggtcccctcgccatcataacattctcaactatattaatcaagttctcaaatcggtcatggttcatgcccttgtggaccatccaaggtgattccgccactcggttccttgcgtagagtaggttttgatgtatagtgcggttcagcctattttgcgtagcgtacttcaactgcatcgaggaatgctgcagcccttgaaaagagagtcaatttgtggacacttaagagttcaagttcatctcgatcagtttgaacaaagccaaatctgcaacacaagcccatagcgtgattctgttacctagccttctcgcttcccctaatccacagccacttaatgattttcacgtcatataaatcatcgagatttgaccttcatggaaaggttatcaatccagagaacgatcatcacggccacttcctcaacgcctcaacagtacctgattggaccacaggcggcgaattagtttctgttgtcatatataaaacgtccattctcttctgtctttgtcttgctttgtttttctgtcacctgatacacaaaaaccagcagctcttggcccgtttagcttgggtaaggttcgagagctcctatcactcattttattaagtggagtcccagccattttcctaacatctcgcaatgtgtcttctgtctcttccacctgaattgatcttgctcgttgcaggcaatttggattcgccgaaagactttctcggcttcctcctaactagcccaaaatgttacaatctcctgatcaatgagctttatcaaaagaatgtccgctctgatggtggatcagcccttttgtggtacgcgagtcgtggggccgaacttggagtccggaatatgctgcgtgcgggtgcgaatgtgaatcttcgatcaccgaatcgggcacagttgacagctcttctggaagctgtgaagcacaagcataccagtgttgtacaaatccttctagagagtggggctttgccagatgcggccgacgcccgatccagaagacccttggctttggcgacaaatggtcgtagcgacgtggcgatcactaagttgctcttagaaaacggtgccagggccgattctgctgtgtttgacaagcatgctcctttatttgaggctgtccggtcaagccaggaatccaaagtagcattactcttgaaacatggggctgacacatacgtcttggactgtcgaaccgggatgaatctcgtgtatatcgcggcttctaagaacgctacttccggaattataaatattcttatagattcgggtatccaaatagagtctcaagatgatatgggaagaacgccacttcaagtcgcagctgaaaattcatgcacacgtgctgtgcgcctgctgttacaccttggcgccaatccgaactttaagaatatgaaccagtatcgggaaggattgagtgcacttttctacgctgcaacaaatcccaacagtcccggtaatggcaataaaagtatcatccgagcactgttcatacatggggctgagattgatactgaaaatcacgcttataagacgcctctactctatgccatctctcaaagtgctattaaacaagcgcaagctcttgttgaatgtggtgccaatatcatggctagagattccaatggagaaacggtcctccatttggctgcatcattatcaagctgctctcctagtttgatggattggcttgtcgaaaacggagctgatgcaaattgggccggcggccagcgtaatgagactccaattttctacgctatcaggaatttttatatccgataaggggtgggctgatgtgaactctcgggatatgcttgggctcacgccattgcacaagattgtcgccaaagaggagacgtgggaagcagctggggagttgttaaaggccggggctgaccgatgcgccatatctaatgatggaaagttccctcatgacatggttcctgatggcccttgggcggaaacgaaacgttccttgatccgtttttacatggcctgactaacattaccatgctcagtcacctttagaaaagctcttaattattttctatgtgcataaccattgcaggcaaatttgagagccccaatctccccatgataatgatcaccatatagactaccttggaaacatcttggtggacactgcgtactctagtcgcttgacacctttttttgacgtaaaagcagctccacgtacattgacatcaaatcagaaatccgaaagcctgcgtgacatactgcatgcggtgctgcaaaatttcaaggccattagccttatggaaggcagaccatcgtacacactacaaacatgcctagtcctgactttcttctgagtgcattagtcatgtggtttgtcattattcttggggtacagtgtcttggggaatccgatgtcaactatagttgttcttcgtatttattattcatctcaagatactgtccatctctacgtgaggcccacagttggctctttttttcctaagacattttgcaatattagtgatagacactgtcaaaaatgcgtggtcgagggtccaattatgtacttgaagcttgggtgcgtggacgccgaccgaaagctacacatttattttctttttagaggctaatgccgaagctggagacttctgggaatgggtattggttttcttgggagcacgcgttcggttcccagagggcatgtcaatggtttccaggaatggtcggtggtgttcccaggagacaatgggatcctaggaggagcacaatagtctcctggggccactatctggcgtcctggaacaatgcagtaacatcctgggactatatagtggcaccctggggctggtggacttctaaataactatgctgagatcatatatgctctgagtttgggagataagatcataacagagcgctcttacataccattctgggttgacaccctactgcaatcacaaattgcctctcgtttcgctatggtgaagtgggctatctggaaacacaactgtaatttttcttatggcacatgtgctggaattacggtgcccatactcacatttttacgtccaactcttcgtctctattcttcaagctacctgtcatggtgtatctagtaccttacagggctatccacagaaagcgccgttatcaagagcccaattggttcgctcgagtagcgtctatcaacagctccgaggtatgcaccctaaatacgctttagactgaaatttaaaatacatcaattggggtctacgcgcacgagaaacattgattgaaagcacatgtgcattctcagatcgttttgcgctggtcatcagttcctagttttctagtccataaaccaaaaatatccaatcattggcctcctagaggtgcccctttccatgaaaccgatgtggctccttcggcatagccatcccagtctttgaggacgccaacgatcccttctcggactttgccaagggcctcttcaaaaagggtcaagcgcgtgatctggttgttctgctgctgtttcaggtactctctttcccgaaacagctgggtgttagtgatacgcagctcgttgttatccgctgcaagactttggtcggcatggtgcttggaaatgcatgactcccacaggcgccgatagagccccacaagacgcgctgcttggatagcgagcttcgggtcttcttgctccattcgctctagggtttcaatggcaggttggaaagcctctgccgccagggcgcgcttctcgctttcggacgcggaggatatgaatggctatagtgttcagtgggtttctccgtaatcatatgccgcaacttacaagatgaccggtttcacactgcgagcttcctgttgctccattttcattcgtacttggctgtgcaaggttagaggcttgtatctcgtttgtatctggggacttgtcagaggtgtccatgatcgatgcttggatgcgagatctgaatctatatctcgaagaacaacgccttctttataggctcacatcgtcgtacaaaattaatttatggaccctttcttgaagcaacgatacttttcaattccgttgattgtgcatcgcacctcgcttttgttgccatactgtgtcggtcgtgatacgggcacaccactccgtttgtgtaaaccatagaagatagaaggcgctcgggtcgtcggatatgcgtatctgataatgttgtcatgtcataccaacgggggtttgaacattgttgagttagccatcattaaaaggcaagtctgggtacgtgtacaataccaccctcatcatgtgaaccaccccgacttatcttgagtattccggttccgaagagaaaaaagaatccattcactgccctcaattttgatctcaataggataggctggaagtgggctagactggtcgccaagcttgactgctacggggctgcaagaaggagattacaccaattcccggttttgctacccaacctagcagagaggatgaagagctactttcttcttataacaccatcccctcagtttttcgactcgatactctaccttagaacgatgcagtgagtatcaaaacgtaaattattgaggacattgccccaactatcgagtcggagaaaggtatttggtggtttatattgtagatataaagctatctgaagatccagaagccctgcatactagcgttctttacctctcgcactcagccgcaatggcccacgtcgcacgcaaaaggacgcgccagagcgctggcgatgtttcagaggcaacacctttgctagaaaggtcggcgagaaagacagaggggggtttcaatcagcaccctgaaggcacaacgagcaccagacgattccggactcagccatctttggagaagaaaaccaccctccgactacgactccgacaggagtactttgatcctgggtccgaagaggcttggtggacgtctctttcaacgcccaatccaaatggcgaggggcgaggacacaagcagctagaggagaacgccgacagagaacaagctcgactcggctggatgcagcgactgcgccctaaacctcatcgacgactctcttagacagaacggttgaatatggagactatatttcttgatatggtgaattgagtaagaaggatgctatgtacggagccaaaatgtctactatgagctatagtgtactgaagcggaccagatctgcctgaaaatgagatacagtatgcaagtccgatgatgattctacttcgcatgcacttttttagattctgccaatttctgtagagcctgaaaaagtgacgtcgtagaagccaagaatgactgacagttggttatgttcagatggtgatgtagagcgggaagtctgctacaaaggaattcaacagtctatactggctccttgctgagacattcgtccgttcaatgcacaaatagctaagctgccagcgaattgccgatccaagctcgattgtggtcgcgaagggtggttgggggatcgttggaggggtcatatgcagctatcctatcgcttttttgtggatgattcatgacgtatgctgttagtaggtgctccgagttcgtcaagcgatatggggaagaaaataagaaaatgaccggatctgctttgactgagaacgagctgcatgtgaatggttgtgcaatgtttcgactgtgcggtcaggcctttgatggccctctgctttatataggcagaccaacagccaaatcttatctcgtacatatagccgacacgatttggacgtgtccagctctctaaacaatctttgcttgggttggtggtcatgggatcactggtcgttagtccaccaccaccgagtggttgaaccatcgtttatgttcaatctggaggccattagctagtagtatatagtcaaggccgtagtgctaagggctgctctctttggagattaccgttgaaatctatttacccctactccaatctgttagtccgttactccgttaatccgttaatccgtttgaagtctaaccgttcggtggacttcgatagatgcttaacgaaccgtcaagcgatcttcacggatattacgaccctatgacaacttttttctagaggaaatagttagttattaaaaacgtagctgataagtctcgtatatttatccgtattaaaagaaaaagaaatgactttcaaaagcaacgaaacgcgcgccgcgatgagatagtaatgtcgagaggcgctatctgtatatatctataccttttttccgtctcagatattctatggagaggggaagctgatgaatcttagataatcgacttggccttgatattgtacctagctaagttcgcctctagctataagtcgaggacggatacgcttggttagtgacggaatctaggaaattattattgtagtcgagcttaagtaatagaaccgtcggcctatttcgggctatatatgaaaaattgggccggtcgctcgaagtagttatactgtagaccttataggaatctgtctcggggcgggacgatgatctaggggaagatgtaagatatcctctacctgctaggtttcccggtactcaataaagatataggaagatataagggtgtaataggatgaagacgggttatttatagtaaaaatccgctaactggaaggcgcgaaccgcgagctaggggttgagctcgatcgtacttaggcccggctagacgacgcgtatagcaaaagcgatcgattctaggaaaagtctcgtcggcttcgagctgaggttaaagctagctcgctccgggctagtcggctagaggctgaattgacgcgtgttagagcgggagtcaccgaggcgatgaaggctttataaagccataggaactataatagtagctcgccggcgggagaacgcgatagggattgatgtcagggaataattcgcgaagtggcaccgtaaaccttgaggagaggttctaatagaccgacttgctaacacattgttttgtttttttatgttctgtaagcacatcagatgcgagcatccgtaggaattcccacttatcttatcgagcctacttatcttatcgtaacctcgataagtaggagtgggtggatcccaagttgaacccccataataggaaatctcatattgtttgtagtgaaaacacggctgtatcacgaccatcacgcgtttttacgcgtcggtaagctatttctggtaatatataagtctcctaaaaaggattagccgcggatgagctgtgattgaaacggcaagtgtgcgtttggtttcttagacagaaaagtaataggagacgactatagatatatatatgtatatatacttcggattaagagaaaggttttgtctaataatgccaagccgtaggaagtgacctaactaataccttataacccctaaaaaccaagccgaaagaaacctcgtagggaatttactctagtgattaagttgagcgatatccgaaagtatatcagaggtctctacgtagacaatcctaatacggttagatttacggtaaagacagctatatctacgcgacgggatttcccgcacggatactaggcgcgaatatcatgcgcttcttatgcgtagccgagaaaatcaagttcgtggtacgtatctttgtttactatatttactagtatttttaattcccctttagcccctaattgctcgaagaatttactctgcctggtcagccgtagtctcgtataatagataaggtaggattatacttactcgtagcagcttattaaccgatagtcggtttagatcttccgggagactctaggcctcggggctctattttgttcctagagagcttcttattattaagctttagactatattagctagggctattagctttagagttgcggcgtctatctcggtcgcgtcgatttagtaactatgctccgcccccgctatatattcctcgttagtattacctcccgaaggtattcgaaaattagactgctccgtacttactaattttaacgataccggactccgtaagaaagatcgtatcggtacttaaggtagctagtactctgccctacctacggagatgctttattccttttaggacctaataatcattagctattagtttcttaatagtagcgaccctttccttcggaaaggggagggaaatagcccgtacgccctatacctaccggctaaacaatcgcggtgtaacggataaaggtccgtacaagagggaaacacatgtaaacctgcacaggctcgggaaggaacatctatgtcatcatacatctgtttcgatgtcgatccgtgaggggttcgtcacatgaacataggcagatagatttccttatagtttaggaccccccaggggcccctccgagactggcaagaattagtcttggcacaccatcaatacattgtgttccctccacaaagccctttgtatcttacccggttgacaggccgtacacctacataacgtatacctttacaattctaattcttcttcttcaactgcctgagatacaatggctccctcaacccgtcagcaatcccggggaaataccgaactccctgagaatcagccccgatcgggagacgaaacggagactactggaaccgaacaaacggaaccacagacccagggaaatataaccaaccctcccgaggtaaccgcggaaactacccgactcatctaagaaaggatccgggtcctcgaagccgaagcggtacttcaggagagacttattactaccgaagaacttatcgaagcaaaccagagaaagctcgagagttaccaaagaggaaagaagtcgaaccgacctaggaacgaaggtgattcgacatcggagagcgagcgcagtcagaagggcgagatcaaaagagacgtcgcgatattcgaaaagaactatagtatcaaaaacagagaaaactggctaaacgacctcgatgcccttttcgaaggagccccgaagaaatacatttcgggaaaacagaaggttttagccgctacaaatttcctctgcacagactacaaaggaaaatgggtgattcataagcggaactaccccggagacgcaagaaactgggaagcatttaaggattagaccaaaactctactccaaaattcccacaatattgtcacagatatcttagtcttattcaataaggcagagatacacccataccaagacccaggcgtcttcgaaacctacctcgaatcgctagagcgtcacctactagaaaccaccgaagagcagaaagcacaaaccctctttataaaattatagaaacctctcagagacgtaatgatcacatctagcaacggtaccttaccgaagactagaggtaaaatatcgaaactagcatctaccctgttccatgtccattttccaccttccaaaagaaaggaccaatcacaacagccccagtccaagaaacgaaaagaaaaccctaccaaaataacctcgaatcggtcccaatccggctcctctactaccaacccgaccactttcagaggaggacgcagaggcaatcgcggcagaggaaggggttaacacaggggtcgtggacgtaggggacaccgaaatgcaaaatcaaatacctcgggagcaaacgctacctcaacaatagactaaggaaacagcaccgaagctgccgcgacaggggcatatttcttttgtggagataagaatcactgggcaaatgaatgtccccagaaagctatcgtctaaacattagtttaaacgataaaagaaagcaaatcccaagcatcagggaaagtaaaagagctagagtaaatcccagtacctcagctcaatatccactcattaggactgctacacgcttacatatgccgattacccttaaaaacagcgacgaaacacatgtggacctagacactagcgcggaatatgatatagttagcgaagaattcgctcacaaccaaaagcttcctcctaccccattatcctctctatcactaagaggaattgccctagaaaggctacgtacacacagtatatactaggtcaaattcactatcaaagattccaggggtaccaaaaaagtcgtgaaacggccatatattggtatcgaaagagacccacgtctagagggaagccctatactcctatccagaacatttattaacgaattcgatatcatcctacaaccgagtatagatcactagtggttcggagtcaaggctttcgagttaatgaatccacacaagtttacaaaaacatcacggaatatagctatcatttataccttagttaaaatgccggaagaaatctagttaccagacaaagatagtaaccatcctcacctcaatatatctaagattccacctaaattagaggcgtatcttaatatattcgaccacaaaaaggcagggactctcccgcgaaccaagtcatccgaccatacaattgagaccgaagaaggtaaaacccctccttatagaccaatctatcctctctctaggacagagcttaaagaattgtgggcttaccttatggataatatcaaaaagaagcgaatctaaccattaaaaagtcctgcgggcacaccgatcctttttataccaaagaaggacggaggtctacgtctttatatagactaccaaggcctcaatcgcattacgatcaagaatcgctacccattacccctcatttcggaaatcctagattgtctctctggagtaaaatactttagcaaagtcgatatcaaggacatatactaccggattcgactacaagaaggtgacgaatggaagacagctttctatactagatatggccattttgaatatatagttataccattcggcttatcgaacgtaccagccaccttctaaagctacattcatatagcgttaggtaagctagtcgacgtcgtttatatagtatatctagacaatatcttggtatttacgctcaatcgcgaaagctataccaaagcgctataacaggtttttaagcaactaagaaaagcagagctctatattaaaccttccaaatgtactttctatcaaagggaagttaaattcctaggctttattgtgaatagagatagggtgaaaatagacccagatcgcatccgagtcgtctaagaatagaaagagccttaaagctaccataatatccaagtattcttaggattttataacttctatcggcactttatcaaaggatatttatacatttccttacccctgacatccatattaaaagggagtaaaaatggaaagaaaccaggccaggtcgcgctaaccggtgccgaattggtagcatttcgcaacctaaaagaggcgttcaagtccacatctctcctttaccatttcaatcctaagcaacccattcggttagaaaccgacgcctcaaataaaggaataggaggtattctcttacaaccagacctagaaggacgatagcacccagttgccttttagttaagaaagttctcaggcgcagaattaaactatacaacaccggatcaagaactattcgctatcgtacactcctttcaatactagagacactaccttaatagcagcaagtataccattgaagttctttctaatcatgctaatttacacacgtttataacctaacagaaactcaatggaagacaagcatattagtatatatttcttataccttttgactttattataaagcataggctaggcaagacaaaccctgtagataggctatctagaattctaaattccaagcaagcagctctaggaatggaattaatgaccctaattcaaaatcgaattataggcaaggagctcccgatccaaagtcagatcgaggatactaccactcttataatccaggggattatagggataaaagatctagacgtagatctagagcatgatccaggggaacatgactcaaagcatatatcaaataaacataactcacaatttagattagagcctaaggccgtataggaaagtcctggatccagtgcacctacagggataaatgcaaaacgcatcagcacagaatcagacaattggtctgaatagagaaaactctacaacgatctagatataccattcagtatcgaggatactacaggggtagttatccagtctattagtacagatactaaagacattctccaatgggttactaggcttcaacaagaagaccaagaaacgacctgccgaaaaggggacatttcggcccagaaaccaggcctaaaaggctagggagtcgatacaaccagattactatagtaccgggggcgtatatatatacctaaaaaagaaggcctacatacaaagcttttgtaattacaccataataaacctcttatagggcatttcggccgcgtaagaacagaggagctactaaaacgcaactaccactaggtgaatatacaagaagatattaaaaaatacgtcaagtcttatggagtctaccaaactacacaagcgccaaggtatcgaccctatggtaagctcgaatcgttaccaattctatctaggccgtttgccgagttatcaatggattttatcataggattacctcaatcgatctagaaaggtcggatagtagatgccattctggtcattatagatcgcttctcgaagtgatgccttttcttcccagtttcgaccacaatagacactacagaattagccgagctattccatcaagaggttgaactaagatatagaccacccaatggcatcgtatccaaccggggatctgtctttataagcaggttttagtcaaaactatactatctttccaaagttaaactccagtattcgacagcgtttcacctacaaaccgatagttaaacagaaaggatgaaccaaaccctcaaacactacctaaggtattttattaataagtaacagaaattgtagccagcacttcttcattcagctaagtatacttacaataatatggttaatacaaccacaagcatatctccattccaggtactcctaggttttaatcctaatttctaaattcacggtaaggacgcctgcgttaagagggaggcgccagctacgctacacagatttgaaaaactgaataagctgcgcgggaagctatagatatcatggcgaaaagctaccaaagcacaggcgaatcagtataacaaacgccatcaagcaatatccttcaagaagaacgaccttatgaccctatctaccaaaaacctactgttaaaagaaggaactaccaaaaagctatctcctcaatagatcggaccattcagaattttagaatatatcagaaagcaggcgtaccacctcctactcccagacaaatatactgcgattcataacgttttccctatctccctcctccaaccataggaataaagagaaggggaaccagaacaactactactaccagaactagcagataataacaaataggaggtcgaagaggttaaagatgaccacgttttcgaggacaaattacattatctagtcaaatggtagggctagccttctaaatacaaccaataggtcccagagagtataataaccaacataccgaagcttattacaaaatacaaaaaggcacaaaagacgcaaaagaaatcaacctaagcagtatctacaccaggccgctatcgaatcatcatagctacagtatccaatcgccataaggaaagacagtcatacactcctcgagcattacctccacatccggatcatcaagcaactccactgcctcagagcaagtttattagaatgaaatcacagcacctatccaagcagtaagcgactcctccgaattcataagtcagggtcgttccaaggcctataccgcaaggatatcccagggataaacggcagcacaagtatcccggtcacctataggatactcagcaacaaaggccgcatagttatcacaaacagactgggaagagatattagcgaaactatcatagagaagaccagattcgccccaatacttacagtaggaatatacatcccactcagactatggttcctacaatacactctcacaagggtatcaaaagccgcgaccagatcgcgaactatatccgcaactacctcgataaactcagaagggaaaaggaactgtacttctttatcatccttatccaatacacccacagctactctaagggtccttctggtcattaaccaaaattactccgcccaggaaagaactgccagcaactagaaacaattcccctcaataccagcaggaacctagttctaaggttagtacaagttctatcagaacgcagccgaaacagctaagaagatataccgaatcacacacgtagtacactttcgaacaacatgcgcaagatttgctatacagcgcatcgatatagcactagatcaccaaagggaaacaataatcatccttatccttatcccaatctcagttagacactcgcatatataatagacaccaggcctaccgacgaagaatagggtttataatggttttccaacgcattcccttcgaaccagcagtctttgccattacactaaggatttagtaccgttatacaggtaaaacgatcagaagaaggggtctagaaatcatagaaaagcagaagggaaaaggtagtaattatactataactacaatcacccactgcaaatccatcaaaggaatacaattatatcccaaatgacagctgtcgcaaacatgtttctttatgcaaatgcctataaagaacatggctatagaggccagattcacacctctttaaatcccctaccaccagaaatcctgcacgaaaagctattcccagacattctctatattatagaaaaatatcaatatcctacagaacacagtcttcacgaaacgtgtacattctggcagagaatcagtatagatcggaagcgaattccaggagtctatacaatgcctctctactgaaaagataacgtatacccatatattagtggtcttgaagaaatataataattatatagccacccttctaaaagaagcataaaacacggagtatataccttatcggtcaccttcttttcaaattgttatacaccaccttatcttctttaatatatctaccgctttactttctttattatggaaactccctgatacctccccgattctttatcttttcgtcccttaacgtttctgtttgcacatagatgaggacatccgcgcagggagggggagataattgtaacggataaaggtctgtataagagggaaacacatataaacctgcataggctcaggaaggaatatctttgtcatcatatatctgtttcgatgtcgatccgtgaggggttcgtcatatgaatataggcagatagatttccttatagcttaggaccccccaggggcccctccgagactggcaagaattagtcttggcacatcatcaatacattgtgttccctccacaaagccctttgtatcttacccggttgacaggccgtacacctgcataacgtatacctttacacgcggcgagggctcctttgtcgatggagtatcgcgaccctagtacctagcctacggataactcaaccgcttcctatactaggaaatcctgacctctataacgataatgctcgagtaggttagggaagcttcgatgggcaacctagtgtatcgtctctactaacgactcggcggaagagggctcctatttaaggcgttggatgttgactaacttggccttattgcttcggagacgggcgaggaagattagccgcccgaaaattcgaacggtcgactcgtaggtcagctatagatcttcgtcgacttatccgatctttggtactacgtttggattctttcgctaaatgggagcgggacgagctaagggggatcctacggtgaatgtttcgggctaggagtcggataggtatagccgtgaacgagaggcctattcgatttcgagatctaaatcgcgctttcgctttagactaagccatatagtccgtggtcgaacggggtgagcctgattggagtctattataaaggcgccgtatggagagggttgctagtttagtgatatatacttaggttatggtgcgatcactttatactccagcgtctacaaatctgatccggggcacgtctactcgagagggaactgaaatgagcgggcgtatttgattctccggccgtccgatattcatacggtcggcagaagtttgcgcgactgcttgcacagcgatggcaactctttgtgcgggtcgttcaaggcctgtcctcgtcacatgttgacagaattataatctgcaaccatccaacgacacaagaaatagggagggtgcaccatacatggtggttcgtggacatgaaagaaacagccaaaatgcccctagctcggacgatgccggagtactatatcattgggccaacatcttgaatttgctacgtagtaggtacacacgcgacaagactccaacaaacgacgcattgctcttggcatggatgatttaggattgacgttgattgaatacaacaaatgcgcactggaaggaggcgggatatcgctgcatgcccggattttccctcagtatcgttacctcactccctcaccaaaccatgcgtgccacaccccactactggaatcgttctggaggctgtcccctccgcgccgaccgacggagctcagataggtcagacgaccccgaagggtcggtttgttgtgcaagtcgagctgaccgtcgttgagtcgatacaattggttggctttttaccgctaacccatccgtggccgagcgacccggagaggacctatccacggaacggtcaacggaacgggttgatcgatggatttgttgctcggaagacaccgattcgtcgatgcgtgtttcgccactagggccgtctgtcctcaaggagcaaatgaacgcgtcaaaagctccattatgtttactgcttttcggtcagcgacagcacacaagacaccatcaaagagggccaattgacgtaccatattggacaagggggattattctcaggtggggagaatccgagccaagtttccatacaactcaaatggacaaaaaaaacgcatcttccacacttcagaactacagggtcggcttgggcttcctgaaggcagatcaggcaattcatgtgttctgagacgggcaaatcattgagactcttgagccgcaatgagtgcgatccgcgttcaatagaataagtggctggacgggttgaggaaattcgccagggtacattattctcccgcagcatatcgcgtgtgacatgtcgtctggtgatacgggttgtctccggtcgcacaggcgcagccactggtatgtaaggtatattccggacagccgcatcataccactgttgtccgagttggtcggcctggcgtgtccgatgccaccgccgacataggaagtgggacgcaatgtcgcgcaggatcgggaggtcggaaagatcaaattgccttctagcaagggatttcagcttattgcgaccttcatcaacgtcattcactgtcgggtagagtttgcaatatgtcccgtttttggtgaggccacaacaagtctgctggtgcctgcgaagacccatttcacagatgaccagaggatcccatcgctcctgagatgacggcatgatgagtatagatggttgttgatttggcaagagagctcgagaaaaagagattgatgaagacggtctcttcgaccgcccaagagtatttatattcataaatcataagtctattcttggagtttcccaaataatatacgcaatgctgcctgttgaaacagatacaatgaatggctatgacggcgatatcgctagcacacgctgatcgggataaccagtgggttgtacctacatcccggagcagtcaaccatggccctaggagcagttgagcttgcggcaatcatttactccgaggaagtcaatgaatctccacggaatttagccatgaaattattttcgacgctcattgctctcgttaagactagagccatgacctggcttgatatcacaggagttctacctagtggcttttgaggtacttttgctcaatctaggtattgtactctctacgacgctatataacgggtgtcgtcctctcttgcaaatgtactattttctagttcagctctcttttaatatatatcgggactctatctttcaatcgatactcagctagattgttagaaacccttactatcgactaatatactagggtattagggacaatagaattaaatatcggaacgacgtgctaaagatatctcgtattaatagtgcgatctaattaggcctattccgaggaggctttaatagccttctttatgaattagtccttataggtgcagtaaaatctatattatatacaaaatataggcccgataactcccgagctaagtagtatacctaataatagatttaagaatggattgctaagtttaatcaagcagatattactcctataaccctgaatctaaggatctataatatagactaactggtatagtattatttagctatattatctcccgcggtatctatataacgtgctagattgattcctagaacgccggttacgttagtatttcgaagttagagacgaagatattaggatgatattgtaaaggctaaagaagccctatttaaggctataactaaggtacggctagaatttatcttttaatacgttagattaggttcttatattagaagggctctaaggttatatagtcgctaccgtcggtctcctctccctacaaaatcgatactatacgagtataatattggtagtataatagagtgtatcttccttagtaccttattagccctacttacccttctgcaacttatatacgataaagttgctcgagctattctgtagcgttgtcaatagaatccgctaataagggttacctactatcccgtatatctattattaagaagaacagttaaaaaccatatatatataatagaacgatctatagtacctaccggattgacctacccgattttgaatactccaagtcacccttatcttaattgagattcggagtgggtattatctctagagatagggtagtcgacctccgcgtacggtcatattcgaacgctagtctaaggatactagctaccggtatggcctgcgatatagttaaggtaagggctggttcgaatttatctagtgcccgctctaactctcgcgtgagtgcacgggcacgggataaatactttcgatcttttatcactactaaagaagggtgtactgtatatactatacgcggagaccgagattatagacttctaggaataaacaatagagtagaactagcttcctcttatgtttccttcatcgaagaaataaagcgagttatcatgctatgtacagttccgctcgaaattagtttcaccatttcattctcattggttctttcttaagtcttggccagacccatctcggcctacatctggactagcccatcatttactatcaaataggaaaagggaaattaaatttcgctagctagactaggcctagcattagtaaaactagacgttgagaaggaatcaaagagaagaaattggtgaaactgatttcgagcgcgtctgtagtgcggagttcgatctcgttgacaaacacgggtaaccgcgcgcgcccgcagaaaacccaacggctagcatataggtaatatttacacgttggctgaccattattcaacataacttagctgcccatttctgcgggacctggagcattgcttcccgagctggcatctaccgttgctgcatcctttttaggctcctacgcctccgttttctcgaccacgctgttaagaatgacctcaaatgactccgagcctcgggaaccttcttagataccgtgttctttcagaaaatagtccgttacagctcccatccgctggctagccttataaataagatcagccaatttgctcacttgctctagctcgtcggtgacctacgttagggccttccgcgtagtgtttaggtcttgatcgagctttacctagattttctctgcacgaattgcccgcgaattcactgcggtaagaatacaaagtatttcctatagaagttaggagagtcttatttaaggtacttgaatggtattatactgactagagtatctatagcttagctaattgagcttaaggaaaaataagtattactaggtaggtcctaaaaccctgatggtcgaatgaattaagtcctatagactcggtttatctagaggacaagcgaattagtacagttatactaccttagtcgatcaggcgactaaggcattgttaggttgagaacgttgatttctgcgggctagggcagcctttacgttgaagactagatcgctgaacggatccgaaaagaacacgctgttgtctccccgagtaaggctaaataacaagtcgacttggcgaaataaccgtcaccgagacacgagaagaagctacggcgagattatcgatggcgcagatgactataatcttgttcatgccaatatacatataggtctatggagcagcgattgttagtttgtcatagcgcacacagctgtccctaggcacagatagattactagatatcattttagttctactatatctatagtcctttctttacttgtgagaccatacctacactcctatcaagaatcctaaaaaggatgggactggaggtcatatacatcgttgttgtccgccactctcgtcaaggcgaccgacggattttccaatcctcttttcctcgagattactagacggtgagtggaatactggaatgtgaattttggctactaacttttactaggatgtcactgtgaccgttgaagatgaacaaagcccgtcagtagcctcaccgaactgactcgcagcttactagcggtggcatacagtactccatgcaagggaaatcggtggtggaatggccctggatggtgtacaggacttgaaggatgaccgttttaagaacatggtcaatatagttgaagaacttccaattataagtctgcatgacacatgcacatgtatcgtttaagaagactgtgacggcggggtgaccgtgcggtaaagtaactgccgtagagatatcgcagcattagatggcaggtctctctgaagtagacctaatagaaataattcttggagacgatcgaagaacgtgctggcactttcgttgaaggcttcttcaacaaccaccgacttgaataaccaccgacttgaataaccaccgacttgaataaccaccgacttgaataaccaccgacttccgctttccttatcgatgtgctttttaaacgttctcacttgaacgcttgtgcttaaacgttcttaaaagtgctttgtttaaccgttctcacttgaacgttctcatttaaacgcttgtgcttaaacgtgctttgtttaaacgttctcacttaaacgttctcatttaaacgtttgtgcttaaacgtgcttaaacgtgctttgtttaaccgttctcacttgaacgttctcatttaaacgcttgtgcttaaacgtgcttaaacgtgcttgaacgtgctttgtttaaccgttctcacttgaacgttatggtagacaaagaactcgcgttccccgagcctcaaaatccgaactaatttggcccacgtagatcactagctaagcgaagttacgagggctgtcggcccatttctatgggatatccgttgcgctaaacctttcagtcaccaacggcgcgtcaaactccacgcacattggataaagcctgtttcttggcggtcattgtgatttctcatactagcgccgaaaatccttcggtcggtcggtcggtcccgcaatgcttgtggttatgctccattcttggaagttcattaattgattgcagggatcgatccagagctcggatttatgtcctcgccagccagctagttcatagctagtgtataccagatacgaggccaaagcgcatgctaccttgttgtaattattccatcgaagcaaatattaacaaaggtggtcagtcttggaccttgggctggcaaaagaaatagtctcaatataaaatcaaaaatttgtccgatacagtagtactgtactatacagcgattttcgaaattaatttaccgctcgagcacacgcactttgtttctcggctcgtacccgaaacgggcgttgtctttattcagataagtggtaacataacatccactgataggctaggtttacttacgactactcttaattgggaaaggcggcgttttgggtacgaaccgggaaacaaagtatgagtgtctgaggggtactgtaaactgttttcgaaaatcgctgtattgtagttcgtaggaaccattttgtgttattcggctttcctgtcggcgatactcctgcaggatttgtccatcgggtgatagatcacatgcttcattcgtacgaccgcctgggtgggtccatggcttgctacaaggttagtagctagaatatcagctagcgggtcatttcggggctctctgtacagtagaatttagcatcatttcaaaccccgcctttaacctggggtagggtatgaagtctagtgatggtgttttgtgcgcggtagcgcagacgcaggtgttaggcaacacatgtgcttctacgtcaagtgtgattgtttccactgttcgaaacgaagataggacgcggataagagcagctcgttgcacggtgcagaggtatcgtaggtgggtcttgtctcgaagggaatcgtgctagacggtcgaggcgtagtcgacgaccagtgtgacgcacgttcagtttacatgtaagtagagaagcgttgtcggaaagtatacaagaggttgcaaggaccaaagcatgaagccgcgacacgatatgagagaatgaacagccagggaagagtatgctgctttcactatgcaatgactatgatctaaactggagatagggcggtggaggcccagacagcctttcaatgacaggctgtcgctaactcggctttcttcgtctcaggatctcagatgagacattagaatgcaggacaacccatcaattccatgaagtacaagctcaatgtgtagtcccaatcatggttgcttcgctatccttgcctccaatttccatactgggcaagttcgccgaatccgctgccaaagctagcatgggagccgaaagaaattcaacatgaaaagggccctggacgaatttacaagccaagaacaagatacagccgagagtgggcaaaatagtgaatgctggcagtcgaattatttatccaggacatctgaatactctcaaatcgaatactaccttttaatcacaaccataagtaaacgctacaaagatgtacaaacaccacaaatgaaagcctcaacgatgcataaagatggtggcaaacataaagaggaaagacatggtcaattgtcggtcttccaactgtgatggaagtgttggcccgatagtcgatttacacgaagttgttggcccagggaccgtttgttcactcatacccattaacactgtttatcagcgagtcatgttgaaacaaccgttaaacttagtttggcgcctacgtagagggctggaaccatgcaaatcctggctctttgggttgctttcctccctagttccacattcaatgcgactttaaagctcatactttcccgcttttgccactgtatctcagacgaccttttttgtctccgtaaacactatccgttgaaatcattctttcccgggaatcgttgcccgccacaccgaagatgccacctacgcggaagcccgcttcaaaggctcgtcaacgggcccctggtctgtccacttctgccagtcgcattgcacgtcccttgctagctgataatgagactaatcaccgatcctccacccgacaagaacagctgcgggaaacgttcgtgagtgtcccttgtctgtaaagccaaccataactaacttcggctcaaaggcaacaacgtcctcttcacaagcaaagaagagagagcaagaggaatggaacgaaacccatcgaggctgtctggatatcctgggcgatgccgatgatgactaccaaaagctctccgcacaggtgatgcaacaacggcaagaagctcagcagaagctgcagcagctccgcagtgagcacctccaagcgacagccacaaaccggcagcttgtcacggagaggcaaaaggccctgcatgagaagcaacagtgcctcggcaaaatccagcggctcgaaacggatattgctcagttgaaacagcagctcgagacagccagcgaccagaccacggagcaaatgatatcgcaaggaatagagagcgaattagagacggctcacggggatctgatgggtgtagccacccgactctggaagaagatccaagaacagcaaaacaaacgctttggtcttgaatttccgcaaagtgatgtgatgcaaccacccacttggacgaactcgaatggacaatttggagcactggacccgaacacgctaccgggccctcccatgacgaacgcattttcgttggatacccaacagacgcagacgatgccccaaatcaaccagtatggagctctttcttgagaagcgtcaggcattagtgccgttggagcgcgttatcgtcaatcgttcatgggtcgtgtaaactaatcaagtatcgaagtctccgcggcctcttttgtctattgactgggaggattatctcagcgaaacaatgaaatatgaaataaaatccaagtagttctcttaaggtcgtgagtgtatgcaatatcgagttggtctacttatcttggtgattggccagcacacgtgtattatgtcatccaacggtccctcgctagattcaatatggtttagtggtactgtaatcatttatcattctgcttcctcggcacggccctgttccgggaggggcggttcgtgctcgggccgccaaagtccctacataacgcccaagtatgttttggacttgcctattcccccattgttatggtgtcaatacttgacgaattgagtatttttgattttcctaggctgctctcattgaatggtgacgtgagaaaaccagcatccctattttcacatgtcacaagtggtgctctggaccgggaagcccaaacccacccatcatttagcgcccgcgtgcatggtggcgttaggaggctggtagatcaggggaaagataccattttcattttatgcttcgatcggcgcacactagtgtgatgggcgaggaaagtaaaagaaaaacaatttgagaaagataataataataataataatatgaaaggttacgcgaggcaacgatcgactgctgtggtcatttcctcttccgcttgtactgtaaccctgtagcaccgtcgctgagactgatatttattgattgctttgtgcggacctaccctcgaaactaatcctgcgggtctgtgtatcgagttgatgtcaaaaatatgctattttcgtttccccatccactaatcgcgcaaggcagatgatctgtcttctccagatctggtttcatcacatgccggcagtccaagaatagctataactactgttcgacatgttcgtccaccgtttttatcgggcgatcaacgttcgattcggatgccgtagccaccgcccggcctatatatcttccgtactgcctgatttgtctctagagctatcccgctagtcctatttcttttctaacaaatcactaatttcacagtttcgcaatgattccagacccctctcctggcatcacagaccggggtcatcccaagtttcggcccacacagtgttccctttcccttatccctcgaagtcaaactcttctgacatacggggcagataggacaaagaacaattgggatctacgtcaaagaccagcagtaacgctttgagggaaagatccgcatatatcaaatcaatctcaatctcagcgacggtgtcccaggttgcagggggaagaggggataaatgaccacagcagtcgatctttgccgggcgtaaccttcttttgattttaattttctttcagcctcctaacgccaccatgcatgtggcgctaaacgtggctagcgcgtaccataaaccagaaatgggtgggtctgggcttgtcggtctagagcaccgctcgtgacatgtgaaaaattagggatgctggttatctcacgacttcattcaatgagagagcagcgtaggaaagcattactcaattccatcaggtattggcaccacatcattgaggtaatagggcagctcaaaacatactacttcggcgttatgcagactttgggctgggagaccacgatagcatcttcctcgacatcaataacgacatggtagactcaccacaaattatggttttatggtagaccaagtgggccatatcggaaatgaggttgcaagttatgcttttttttcaatccttgactggtgtcaccgatatgctctctatagtggcccaaaacggaaggcgagattgctcctgagacgcgaaccgttgtgatcggacagatgtgccgcagtcatcctgcattagggcgaacctagtaagtctgggtacagtagaaaaatacagcatttccgattcaaaattacctcgggtggagctagcggatttctaaattaaatactctccgacactatcttactgtaacgatcggcaatgatttggaatcatgacttgctcaaatataacaatatatttctatggattgagaatgatggaatgtttgattccagtagagcagaagctgtaatatcgctgtgatgattaagccagccgttaggaactgggatagtgggtggtattcagcctgaaatgcagcacaaaaaagcgaagggagagtttatagcaaactaccatatttgacaccaacaaatacaatgttagcttgccgtgatagccggcgatgtcgatgacgatctcactggtagggggaatggccaatggcccgcgcattcttgttaacacgccggcgtcatcttatggcgaagctgatcaggtaggcgctctacgggaggatatgctgcaaaggatggatcatggaccgcagtgtgaagagaattggcttcttatgccatgcatgcagatcttttgctctatcgctttgtccgctgcgcctttacttccgctctcgattctcggattaggtagcatggaactgcttgtcacattgcggctcaatccgtggaaaacaatcgcatcactgtgtcggcctcttggggtgggctgcttttcgatccccgccgacggtatccttgcccttgttcctacccgcgttctgccgtaactctttcacttcctcttctaggataacgagtctctcccccagggcctgcagagcctgctgcgtgtttttattacagtcgcgctggaccttggcatattcttccatacctctgagaagtcacgtcagcttcgctctaacagtcataagcaaggaaaaaccatgtcgatcggatgtggcactgactcttggcgtagatctagactatcgaatctgaatcagcatggatctcgaaatttcatctatacaagggcaatatattgagacgtactcggacagcatcgtaaaagccatcatgatcgagccctcggggggatctccagaagattggtccttgactgagccctgctcatgctcggccccttcatcggcctccatagcccagtcattttggtcgtcgtcactgccttcgtccatcggggtgatctcctcttcggaatcagattgaccatctgcttcgtgagtttgatagttcctgccggaagaagttgacctgggaggactccatacgttccttgacctatcaggttggggtgcagaccggcataatcgactccggtaactcgttgagtccgtgttgggaaggtagtcgcctgcagtgaccatatctgtcttccaggcttgacgagttgattacgaattagatttagagtgaaaaactaaattgatatgggagcctagactcctttataagtcaaatcaggcagcatatcgcaactgagcctggagcaactaacagggatttatccctgcaaaggcaattgcttttgagaagcaccaatagaacaaaacgtagcaccaccccacgtcgattgctagaacagtagttcaccggttaattttgatccgtgatcgaggacatgtattgcttgagacactagttgatcatgtgctgtattatatgctctggggcttgtctccaacgattctacctagctagccttccccgcttggaagctgacgcgaggaagcaataaaatgatgtattaattttatgttggttgtgttggttgtgttggttgtgttggttgtgttggttgtgttggttgtgttggttatgttggttgtgttggtttgggttaattaaagttaccccaatatagccaagcacataccagaaaataacttgatggcgggaggcaggtttccttccatgaacaatataaattcataccctcgtataaatgaggaactaagatcggctgcctggagggtgaacacttttggcttgcacggcgctcgaccaagaaagaccatagctgaggagatggcgaaatagattaacaggtagattggaattatgtcaaatgcaagtggtgaccggggtatggcatctatgaatcaccgttgatctccttgagctcgattccacatagaatgtctccacaggcaccaacccccgatagtttggaagtgttgcctgtttattatgcttctattgcgtagaaataacggtggcaggttctctttcctaatctataagtcacccggctttgtacatggccagtcatagcaatgtgaggctgtggccacaacattggaagggacgactgcgttatggaacttctgccagaattgagcagcgtatactgggagcatttccaaccttctcaagacatgctatctttcgtccttgaacaatctcagtcacatctcaaagcactggcgggacgtgaaagcttcgcaaggtttttagacgtctcacttataagtgacatactagcaaagagaacagaagtgatctttgaagcaccgagtccttgcgtatttcgatctgacaaggacgcagccggtgccaatatcagctggctcgacgttgtcaacgaaaagaactatcaggccgaacatcaaggcaatggtatttaccattttcacatgcgagacaagggcgtgattgttcaattatctaccttccaacacaatatgattctttcgggattgcctcggcagctggtgtaaccttggtcatacgagaaagatgtgcagatggagttgtgttccctagccctggcggcggaaatgacttcggttatgaaccaacttgcgtcggaaggtaggtacactcaaagtatggttgaccctactcactcgctcactccatctcgcagccattaaagtaaacaacactgtgctcgaggagataggaaaaagagtgcaggtacttcgccacttcccacagccaggtcaaagatcagcagcatcatcctttcccgagcgtgatctggtgtcggtcgagtcgcccgcgattctttcgacagctggggctgatacttactttctcgatgggttcgctgtcgagactcaagacccaaaagttcaaggcagtaccaaaaggcgcagtgctacaaaacggagctgtaagtttgggaccgagaaaaacacgaagcaacgatccccagaaacaggactgacaatatgaacgtgccagcctccaaaaacaagctttggcctccccacgtgctgaagcagcttccaggatggttcgaagaccaagttcagagaaatttttcgcaagacgagattgcccaacacttcgaagagaaattcgagcaaaaaaggacctttaatgctcttgaggccatgttgtataagctaattggaaagagtccctataggaagcgcgggaaacggtcctcggtgtcctcgagacctcgtcagtcttcaccacctcatcattcgtcaagttcattagacttgtttgaacgaaagatattgcggtcgaatatagatgtacacacattacatctagccccaagcattttaccatacattgttgcggataacagcgaagatgagaatcctgtcgcccacccagatgctcaaccgattgacttaaccccagagtctagcaactcagaggtagtacttgaatatggtcttgtaaatggagagtcaggatgcttgggtgcatcccaaggacacatgcttcagccaggtcaatgccccgagacggaagaaccgtcaaaagacctcccagacgtttcagacatgatggctgaagccccctggcagttggaagacccagatattgataactctattcatgcgattgaggccgatttgaggaggggtggttctcatacacctcaagggcctcccgtcgaagttgcaccaatgcagatgaatcagtcagctttgtcgcaaggcagccgaccagacaacacttctgggcagggccttgtagatccattgaatagggtctcattgaatgagaacacccaacatgaacctgaagacttcttcgatgcgtccagcctcgccagaacaaccaccccatctcaaacttctcagccaaaccgccatggcagctcgactgaggaccatcctctgaattgcggaaacagtgggacatccgccaatttcatcgaaggaggtttggccgaggaagaaatcgtacgaaggtgtcttcttgagagatctcaatcacagacggtgcgacttcatcgtccatggaggatcgaggttgtgaaccaactgccgcaatggctcatgacacggaagcatctatcaaaggacagactggaagttgagttcctaagggacttcaaacactatcgaacatcatctgccatcagtgctgcttgtcgcaaaaaaagaaaggcagaagcccgtcagaatattgcaccctcaagctccagcccgattttacaacctcgggccgtctctgtggcatctgacgctattgaaacatcacgtatgccgaacaccatcgcctcacaaggcacgtctagcttgaatccatcctacttgtcgagcaaggagatgagtgctcctgagaactcaccgttggaacggtatccacaacggactcagcagcagattccagaggatagagagggatctttctccaatcattcttttttctcgcatggcgaccaagaggcagtagatactatcccgcctgcttccgttgcctcgtcatgcgctcctgcgcaaacgccggtttcgcaacacgtctgggttgccgacgatattcttggcatggacaatccgaacgacccttccctagctcaatctatagcagtcaatgatgggaatgctctccaaactagactaaacgtggagagcaccactccacaagctcagttggaaagggggtaccatggagctctgaatgacggggaaagaggccggcaaacatcaacaccacctgaagtgccagtgggacaggaatcgaatgaccagaacggggcgcgaagaccaccccccaagggtaagtctgtctcctctccttagccagccacgctttcagtcccttgcttgtaacgtgtcagacttatccaactcattgagcgcctggcttctgactcacactcattcatatactttttgtccgcacactcatactgactaactttcttgaagcgtttggagaaggacaggcatggcggcatgaccgaaaaatggcagacagcacacttgaagccaccggggaccagtcgtatcttcccgccgttgacacccgccgcccgcaactggaaatatctccaaatctacaaaccacaccgcaggtccaagcaaaacccgtgaccgtgccatccgcgaataactctcggacctttcacataacaaagcaaatccaggatgattcctctggcttccaggcctcatcccctggagtagacttccgcagagcccataaagcccaaagcccaacccagcccaacccccaaatgggttgggtttgggcccaattctcgggcccaccgatgggccgtgggcctatagtaagggcccatgaggcttttgggggggcccattgggccccaaacagtgcaaacatgccaattcttggcatttatataagttatgtagaatttcctagtatttttgagtatttaagttaccgtctgaggcccctaattgactgagttctcataagaattgactgaaatcactgtttaataagattgataagattaactgatgagatcgattgattagatattagtggaggctaaactatctacgtgaatctaataacgtttatataaatcatccttaatatacttcctcttcctccccgatgtccgtacctaagacggtgcagtagtgaatctaatagtagaatcgttattatcaaccctatcgttatcgttatcgtcaatatcgatcagatccctagacctagaactaggtccatcaccctgctctttagtgttactgatctcttcagtatcgatattatccggtttcttaatactttattctcttaatacgttaatcttattagataagaggtcttctacttgtgagacccctaggtatggaatgcctgagggaatgctgtatgtaatggaggatcgggaaatagagatagtagtatacgcagtggtatattagaaactaatagctgcttctccaaagaagcaccatgcgaggataatatacaggttgtgggtcacatgattaaagggggctgtgcaggcagcacacacggctcctgcccagtccacagttccccacgtaccctgacaggtgcaatacctcaggcatcagccttcttagtactagggtcctgacactactacctcctttgcctcctagatattaaggttaaaccttaatatatagagaaatagtatcagctctttaatagtattagaatttagttaaccgcggcgatagtagtagatatcttgtatagtattgaaaagacgttctatcctagcgcctgttatagggattataaggatatcccttataagtatagtaatagctggaaaacggtattgattctctttctaaaaggagagcggttctaaatcagttatatctatataaaattagtattaagtggagagatggttataaagataaatatagagatagctatgatataattaaaagggtttaacttactactatcgagatactacgttatcttattatctatgattaggcctagcgttactttggagtgaggcttctattttcgagctaagttacgaagcagtgatcttaatgccgatctagaggaaggctcttataggccttaggcactagtaagacgttcctagataggtataagggtatctcggaacgctactcgatactgattatagagttctttagtatctgcctagttattagaaagaaagaactagaatctactatctagtaatagcattgtacaaactgtatagatatgcctacgtattttattagtctctttgtagtagttacgtaatttagtatagctagctttgagagagctaagtatctactgtttctaaaggaccctctttcgccttagctgcgttattaatctcttaagatacttaaagagcctattgtagattaaaaagataagatacgatattacctctcggctctttaaaagggtaagggtaaaattaaagaacggcttagtaagatatagaaggtagttaatttggcgctattgattattattaagtacgaagtctttatagttaaactaatcatagtactttataataaagacgtagagtctctttacccggcgtaatattagaaacgttgaattctatcgagttctaatatcctagatcggtataagcccttaccctaggggttagatagtaataaaggagtcccgacgctaggagctcccgcggatataaagagtaagataccgtactttttttagggtatacaagatatcttacttcttagatgccgcgtttacctttataagggtgaattgagtgtctatctatatcttagtagtattatttagtaggactacttttaaacgattaagcagttagtttaaactcaattagattatataggtaagataggggattcggataatattagtattattaggtaaagactattaaagagtattaactagagtcttattatttaatacgttgttagtagttaatccaaagactcggtacttaataccgtacttagtaagcgtctttataagtatatcacttagatttatacccgaatacgtcctataaaggggtttaaagccgagtagtacctcgcagtagacctagtcggcgtcgataaaatagctagtaatagctataaatacgtatctaaatagagatatctaacagtctaatacaactgagatcttcgtatactctagaagtatcctaagtatatcttactactaatctttgatactagtagatagccgacgtcgaactgtattagcggaaggaacgttcggaaggcttagggcggattgggctcttataataaggcgacgaaaggttagattctcaacgagattaaatagaagccggttaattataataaattgtaggattttattatcctatacctcttacgagaaaggttcttcggtcgtatcgccctagtttaaatactagttagtagtattgatccttaaaggataatatgtctttatatactatttaaagaaacctcgttattctatccctctgccggtgtctacttacagccctttaataggaagaagtattaatatggcgaattatcgttatcgtactataacgactatctttccttaagctcttaccttatttagccccctccttcctagtagcgtaagggtatttaagaattatagagtatttcttatatataaccttcgcggtactatagatagagtgtgtgacttggttaaattccttctagatcttcgcccagctatactacgagtcctaattaatcttactccgagatctatagtcagtctacagccactagttgacctaatcgttatagagtatcgcgttataaaggaaatactggcctctgctaggaccgatacattagaatcgtttaaaaggatctagagcgatagacgaaggaatagacggctaaacgaacgagaagctattaacctactgagaggtagacggggtagctaggtagatagaaggcgtatcgaaagataagtcgtctagcttagagtcgaatagacttaactaaaaggatctaaactcctagctttacgatataattagtgatagtcaatagattcagagttatataattagcttataggtaatggctttaagggaatcagggctagggaggaaaaactaacctaccttcttagtaagagaactatcgacgcggtaggcaaataaaggatataaatagaggattatactctatagtgctagtcaacattaaaacggagggtcgcaatactagtatctcattagctagataatatatatttagtggattcggcctatctaaagcctaaggaagcctatagataacctatctccccgcctattttacaatttgttcgtccaaaacatttcacccaatagctcgtaagatatctttaagcttctcttacctccggaatagctagaatatcacggtattgtaaaaacagacgtcgatagtaagatattagctatcttttagtataagattcaacgctataaacctacaatttatagatttgactagactgcggcacgatccacaatatccgtggatatccacaatccatatccgcaaactgcggatatggatattttttgatatccaagatccgcagccttgcggatttggatatggaccttatatccattggatatctgcggatatccaatggatatcaaacaatacaaacatgcctagactcgtgacctcaaggggtgtgcattattattatacattcctatgtatttttcgtgtaatacttggtactcgaggttattgaatattaccaggtaaaccgtaagtataatttctgaccttagtcagaaattatgggtagaaggtcaagtactgttctactcacagtagtatacaattggaatctctgaccatggtcagaaattcagtctatacattttttagggggtttatgaatttaaatcttctaggccctatttactattcatagatctaactggaagccatctggtaaccttggctgttttcgaatctaccctgaacggcctagcatactcccatcgaccggcatctctagaagcttatcatcctcttcaacagcctcgcatagtcgtttttgaggttattttccttttacccgtctacgtcgctcagcactatcattatccgagtcattatcaccgctctcagtatactgggtagcctcgagtccagtctcttgatcctcctccttattatcactgataggctccaagacctcaagctgtggtaatgatctccgggtttgatctagcaaagcagcttcaccttaggatagagtgatagcccgacagttatcctatctagcagagaaatatagcctactactaaacagctagttcggtagacgaccgggtaggactaccgagtaagctctactagtactatctagtgcgatcgataaagcctagtataagtagactgcggcacgatccacaatatccgcggatatccacaatccatatccgcaaactgcggatatggatattttttgatatccaagatccgcagccttgcggatttggatatggaccttatatccattggatatctgcggatatccaatggatatcaaacaatacaaacatgcctagactcgtgacctcaagggatgtgcattattattatacattcctgtgtatttttcgtgtaatacttggtactcgaggttattgaatatcaccaggtaaaccgtaagtataatttctgacctcggtcagaaattatgggtagaaggtaaagtactgttctactcacagtagtatacaattggaatctctgaccatagtcagaaattcagtctatacattttttagggggtttatgaatttgaatcttctaggccctatttactattcatagatctaactggaagccatctggtaaccttggctgttttcgaatctaccctgaacggcctagcatactcccatcgaccggcatctctagaagcttatcatcctcttcaacagcctcgcatagtcgtttttgaggttattttccttttacccgtctacgtcgctcagcactatcattatccgagtcattatcaccgctctcagtatactgggtagcctcgagtccagtctcttgatcctcctccttgttatcactgataggctccaagacctcaagctgtggtaatgatctccgggtttaatctagcaaagtagcttcaccttaggatagatactctttaataatccctagctcctcttaccgaagatcaaagttagtagtaaactgatatagcattaggccacagattatactcggcttcaattgaccataacggtaataacagatatcacaagcacagttgaatagtcgtttaataccagtaccactagcagggatagatagaatgtcccttactatcctagctagggtcaggaagctcttctcatattccttctagaaaagtcgaggtttctatcgctcaattccacgagtaagatattgtgcaatctcgtcgttatctagttttataagctcttctaatagctggttctgggatacacaagtaatatcaagatcacagttatcattcttattaatagctactccagaagtctctagtgctactaggtcattagtatcataggtaagcatcttcctatatcgattaaactctcggcttaggacctcttaataacgatttatataatcaatatcaccctgccaatcagttaaggaaaagtaccggagcttctttaatagagagaagattgttactagagtatagatatcactataaggctcatagtcagtagcagtgtagtacttagagagctttttctttactgtttggagtgcccacaatatccgtttcttctagatcacacctttattcttaagcttcacctcggctgcatcgagataggagaaaagcttattatagatactatagatattatatgcggtaatatcctttatctttgacagtatcattataaaatcaaagaagggctttgttagaagaagaagatactcgacttaacgccactcttctggatcaagcttaaaataaagatattgatgattagtataatactgatcatagaatagctggagcttcttagcccagttgagcattaaaaatattaaattctatcatatctgaatatcttagattagaattaatataggctccggctgaagggccataaatacctcctgacgttatgggcttatattaataaagactgctagtccttagatcttctatacttttattagtctagctattataaggatctaggggtagaagatataccttttttaatatatctatgatctggataccgctagaggtattacacttattctagaaggagtgggttttttcctcagaccactctaactcaatctctttattacttggcactgccttaagcttcctaagaagcttatttagactcagctggattatatgcgcgatatatgggacacagaagattaagatatctgatgaatactaagactaaaggtggtcctagatactctgtatcaaagtattattattagttgcgttatctatagtcactaataggatataatccgagataccatactctgttaggatctaggtcatagttttactaagattttcaccagtataggagccatagagaggctcaaagcctagaagaaccttatagtaatcccagttataatcaataaagtaaccagtgatagttataaaggcctactagaaaggagaagtccagtaatctaaggctattgatagccgatacccctctagaagtctctatagaatccccttctagttattctggattattatatcgagataacatcgaatggtttatactaatggaattgtaagtttagtagataattgttaagcaacctctaatatgcagtagaattaggggtattcgatcactcgaaagggcagatatacagtcgaaatgaatcttagaatagcatcggagagatagtcttaggtaaatgatatactagtagtacctggctagatcaaagtactcaatattagctactaaattataaagaacttaactactgtagtaatactagttaagtgctctagttaatataccattcttttgagaagctggtcgattcttaggccacttttttttaaacatgctccagttttgaggtgtgctgtcataggcgaagaaccagtataccggaatcttagatagccaattgtacagagacataccttatatataacctttagctttccatttttattatttataacctggtagaagctatcccagatatccgatttactttttgattcctatcgaattgtattcctaacatcagactgagatctatacttagttataagctaccaactaacgaatttattacgtaagtcctccatattatcacatatagaatcagatagatataaaacccagtgcttttgaagggaaggtccgacgcaagtaagggataagggtataagggttaaacgagttaaacaagtcggcgatatcgataggactggtgtttagatacccaaaaaatcggagaagttgttagggtaaatccaatcagaagctaaatccacatctgaattagtgaacgagaactatgattaagacattaagaagttaacaattataatatatagtatagtagggtacttaaaagaatagagaggcttacatctgaagtagtagaggttttcaggggtaaagtaagtatactaggatattctaacttagacttacttttaatgtggtttacctaaatgattggctgtattatatattagtgcagataattagaggatatcctacagattttaaggatatcttaaggatattgaggatatcttacagatattttatagatattttgtggatatccacaagatatctgtaagacctcgaaactcgcaaagtccgcatttcaagaacttctatctcggatttctcaagttctaatagtcagaacaaattgaaaaaataatcagtagatagctaggactctcagcttttatttaagcctaaggttgaaataattcatccaataataaaggttttgattttccatattctgtttcttacaaagtttatcattattaacagtcgttaaatatatatttctatatataacttacaacaaaatcgtcaatctacggccatctttacaacaaaacgtcggactaagaaaactacgacactacctacaaatactatataaggagaccttcgatacatatctatttcctaaaatttcaaagggccgaccgttgattaaaggggttggttctatcaggaccaaacatgcgtttatttcaacggtaaggaaatattggtaagctatattaagatcatatgacaggctacaagggggaaagtaagcgagagttatgctagtgcggatatccaaggatatccgcattgcggatatggatatcaactcatatccgcagtgcggatgtggatatcaactcatatccaatatccgcaaattgcggatataaggatcgatctgatatccattggagcggatatgccgcagtctaagtataagtataaggtagtgaccctaatcgccttcgaccttaaaggtacttttaacggagtcaataagatcagcctagatacgtcgctataggtaagacggatcccgcttatagccagaaaatggattataagctttataagcgaccggcacgctaatatcgggtttgacgacttccgtacggagactactccgctagtgaactctaggctagcttaaggattactactttccgctatcttatttatattctttaataccgacctcgtagatcagcccgtcgactcctagggaggtatatcggcattcatcgacgattacttccgatagagagtagggggctcagtagaagagaatttgactaagatacaatccgaggatatccctcgtatcgaagagtaggcgcggagaacaggatcctgcttcatagcggagaaacccgaacttatctatctcactagaaaaaggggagaatatatagaaggacgaatcatctttaataggaccgacgtcaagccatcgcctacagctaaattactaggctatcaagcgcgccaccaaaacggcaatcgctttaagtggactacgacacttgcgcccagagcagatgcgacagctctaccaggcatatatcgcccctatagtagactacgtatcgacgggtaaggaaatattggtaagctatattaagatcatatgacaggctacaagggggaaagtaagcgagagttatgctagtgcggatatccaaggatatccgcattgcggatatggatatcaactcatatccgcagtgcggatgtggatatcaactcatatccaatatccgcaaattgcggatataaggatcgatctgatatccattggagcggatatgccgcagtctaagatagacgaaaacatctttcccagctaggtttagttcctctgtaaagtaagcagaggctattacactataactggcgagtaaagaccaccgttcgctacatatggaaagaataggtggtagcaggcataacatggcaaacgggagaggggaagctagctggcgatctggcaagatcacgagatccaccaagcgattccaagtggttctatgtaatatacggtactgtgacgatgactcattgctgaccatacaaatattacaatgacagttttgccaaaattctgaggcggtgacctcacccggcctagcgcgcgtcgggattggtttctccgaatcaagaagaaagagtctggaggtatagctgatttcgaaaagtactgtatgaaattagtttctggtacgaacctcacaaattaggctgcaacaatctgagagggtatttattcaattacgtaaacatattattttccctctttctatgattttcttacctataaaaaagcatttaatgaaaatgctgagcaatccagtttagtccttttacgaatgaaagaaccctcaatctcgattcttcacgacaagctacgaaatgggccaagttgtccaaaaaagcccagacgaaggtcaattggaacattaacatagcctatgatttgctcaacaagctattatgacagtcgttttggaaaccaaataatattgctcaccggtctatgccatagtattctgtactggtgtgaggagtaattttatcgatgatagctttaggagcggtgatgagccattttcaaaattttacaattgaagcacatgaaaaacctcttgaaggtatcgaaagatcagtcaagtagaattatttttagtcacaaatgaaatgtgccattatgaactaagaaatactacttggcagaactttgacatgggggtcctagttgtagatttaaacactatcgctatgtaatgaagtatgatgatgattgtttgaagctcatgaactgcgcattttgactggccaagttcggtcattgagatactgcgatctgtggaactagtcgatctacttgccgtttctccgcacttatatgagatagcagaggaagcgatagaaaatgcatccgttcagattaaacgatttcaccagccgaacttcttctgttcacggttacagaacaaaattccacgagttagataaacactccttggtgatgatctcagaaaataatgacttttgatccaaagaagcattcgcatgacctactactactccaccacctcagtacaactgcctcggagacaaccctcatccgtcagcccaatctggaaaaatgtaatgaattgctgaagctatctgttcctggtgcttccatatgtattgaagaagtgatgaaagatgccagagaaatcttctaccgaatcgcagtcagccatccaagattcctctcctctattccgtcgccagtatcgccactttccaagcttgaatatggtttgaccacggcccacaatcccttcggtgaagctgggaggcaggcgccagggtgtgtaccattgagagcggcttgacttagcggattgcagggatattcggcctaccgtcatcagcggttgggcattttgtctccggtgcttctatggccaaactcactgcgatgaaagttgcgcgagatcaaattctcaatgttgaagagcgttcgaatggggccgtctatatctcggaacaggctcatttgtgcattcaaaaggccctttgaatcattagcatttcgggccaagaaggcgaaatcaaagttggttgcaagttccgaatggatctctcactactgaagacaaccatcgatgacgacctttaaaatcatcgaaaaccatttctacttatggcaagctgtgatactaccgatactggaagtatgatggcttcaaacgagctcgcatgtacagtgcaatatcggaagatgtggctgcatatagatgttgtgatataaggttggtgcagatcagaaacaaaaaacctctgaactacaacaatagatgcagcccacagtggctcggtcgctttctctgtgactcatcgaccaaagaacaaggaaatctgcttcgcagatagtatcgcctgggatgctcataaatggctatctcaaagccatggctgcggcgccgtcttctttcgtcaccaatctcaatagttggaaagtttggacgtggaacgccaagaagggcttcccaacccctgagactggggcgtggaaaagacccgtccggcacaccatataagactgtggtttacattacacgtgcttggtcttcaaaagatcgatcaagcgattagccatggatttgagctttcagcgcatctagagtgtatgagcagtaccttggttgactgggagatcatctcgccgaggtggcagcctcactatgaagaatataacagcctggcgaagcacatctttataaccatgttgctgagctttcccaaccgcttcaaataagcgatagagtaacgctcgtaggtggcttacgagactgtggaatgcgcctgagagcgtttacagtacagagaaggtgcatagttcagaatctgcgatataagaaattcttcatttatgtaatctttatggagaacattttggccggccggtacaaagggttgattagattaggcatgctaaagaacagcttttagaagatagttgtattttaaatagtactattgtcaaccgagaagcagggattatcatcgataatagtcgaaagataatgggcaggggctgtgcaagcattaaacaatgcgtcgtctattactatttgtgcacttcgaccaaatctgttcgggcactttgggctcttcaattggcccacattgcaagactccattttaaatacgtgcccctgagctgaaaaccccgatccaaaatgattggccaactcaggttaaaaacatgacgcccgagcgtccgcttttgacatgtcatattttcagttggaccagatgcgtaagcatacggacggggttcagactggcagtgcaagtcaggctggtgctactgccaaaccaatacgatcaatttgaattggatcttcgttgatgagacgtattcatgaccacccaagaagaccaaagacttcagaacagcccaggcttcatagggcgttttgactttccgctatcaatttacccaggtgcccaccaggatcttctttatttcgtcgtttccattcaccataattctggtttgtatttgaaaataaccctgtcaagtcacattactgtggacaatccattttctagcgtttccaaaaggcccatgaattgcgagtcggggtacaacgcagcatcaggtccggacatcactggcgcaagacgagagcaaattcgcaatgaccaactgtatactcaccgagagtgtgattgatgagatgaaagaaaaaatgagaaatatctacgcagagctgggcaaagtggagaagagttgcaccgaaaagattgaagatgtctcacagatgaacgaaaacacgatgttatcgcatgatcagtggaataccatcacctcgttacaccaagagctcattgagaaacattacgacttttttgtggtttcacaagatctagcagccatcgcgaccataggaaacctggctgaaaagcacaacatgcccgcccgtatgtggagttacgggatctatcgttacctggaactgctacgaaaacatcgtgctcactcgctcgacgtgcaagaacatttgctaaatttcacacgtctatcatatctgatggtgacacttcttttggagaggatatcgcctttcagggagatctggaccgaatgcctgggcgatctagcgcggtatcgtatggcggtggaggacacagatggagcggatcaaagaacatgggcagaggtatcgagattttggtataaccacgctacagatcagtgtcctgaagctggtaggattcaaaatcacctcgctgtgatctcgcgcccggatacattgcagcaatttttctattacaccaaagcactgataatcgcgcgcccattctcagacgcgtgggcaagcatgaaacagctggtccattctattcctggggcaccgggtgataggaacatcttggtcaattcttttatggctgctcatggtgcccgtatcttggacttgccagttgagcagttcgctcttcggtcgaggatcttccttacgaatctgcgccaagacgtcggccgtttaggtcaagaagcacaacaaggcatctttgttacatgctgtaacatcggtgcaatacttcaatatggcaacaaagatggtttcattgccacggagttcaattcaaccgacaatactacgcttggagatgcctatgctctcgcaaaacagtgggcgtctaaagcacacgtcgacccaaacagccatgtcagtaccgatttatcatctcaatacgcattcagtgcaagctcattcgcttttcatactttggccatcatcctcaaccagcctgatgactggaacttgcagcctgctgtgcatgtctctatggccttcctgtggtgccttacgctccacccagcagtcatccagcgacttgagcggctggtcccatggtcgatacttgccaactacctgaacagtctgtttcagcccaacgtcaatatttcaacgatcaaaggcaaatcattcccccgcattgatggcaccaccccacagcagctgccggaggaccttttaattagaggccacacttggagccgactttactaccctgccatgtttttcgacgcgacagccatggcagaggacaggccattgattgaggatccttccacaatgctccttagagtacacaggtgcctgtggcttggaatgcagatcgcatcggtctgcctcacccgaattcactataatgtactctggtctaacctagttctgatttagtattctcgttggatgaagtacgacgatattttacggttcacgcctaccagacttgcatacgaatttgcgccaatctctcaatccctagaccacctcagtgggagtctctactcgacacctaggctcatggattaggaaatgagggaagctttgaaaaacccacaaggtgaccatcatctctcttggtcggaagatagggaccacaatatcaactatgtatagtgagtaaaatcgaaacagtagtcgaagatttctcttttgcggatcagaaagcgcatcgcaacctgtgttttcataaatgtaaacgcaagttgacacagacaaattgtataaatgcggcagactcggctttgagtcccacgtctggctggtagctctgagttatttcatagttgagccgtcgagaaagatcgctcctgggcgcgggttgagagatgaggacatttgcaggccaatgttactatgtagctttttcattagcctcactaggcgcaaatgcagcatcggaagaacgaaagtctggaagcgctgagagaaaaatctcttgacagaaaccaatgatcaaaattctacagttactagtggtagtatcaagccaactacctgactaccttgacgctacgaggtcgaaacttcaacacaaaacctttctagccttgcatcaacgtttttttcttggtcaactgctaagatcttgaaacacgagacactgattctctaagatgaacgaccaaccagaagtgaagtcccaatcgcccccaacactatacttcgcacaactgtgccaagactcctgtctcatccccgaggtttcaatagtgatgctagagggttcatcaattttgcacattgcgacgttagcgcttttgcttactgcgccagtccttcagttctctgtcgtcataaagagagataggcatatgagcagctagaccctagagtctagaagaatagtaagcgttgcaccttcttctataagaacaatcaaactaccaagaagcatgcacttcgagtacacccccggacctcggtttgacggtggtggagaaacggcaggcttctcaacacctgttgtatcgtacgcacctgaggcatgtcacaaagcaacaacgtatacagttttgaagatacattctccgatcaagggacacaaagtcctacctgtggagcgacgagtgatatcttattgggcaatcacttacttgttaattagcaactcatccgcatattacctgtagtcgagtagggtgcacttactcttcttggccagccactactatcttgtggatacacattgtggagatcatatggcccgcaagacagccacatggacatatttatgacctctctgaagcgagtatcagaatgacaaaatcaggggctccaatattcaggtctagaatgtatgcacgggctacttgggctacttgggctacctgggctacttggccatcgatcgtataccgtattctaatattcattcattatggatggggatcgggcgtgtagagtgatatatagccccgtcgaataatgtgtggctacatcaaggcgggacccagacggtagtgatcaacgctgagatgctatagttgatcaccactgttacttcgaccgccgctgccgaggggtccaagctagccggagcttagaggcctacttaaggcatgaacacttgtgagcaagctcattctccaaaattttctttcattttcattcatacattcatatggcttcattctgcatatactggtagatgatacatccaattctcatcgactctggttttcacacaatttgcaattgtttccatctgaaaaatgacaaacttcactgaccgcgcatctgatgaacgcggtactcggaccttaatactcctgtggatcacagcaggtatcgcacttgttgttatagctttacggatttccagaggggtcaaagaaagatatatctacgtggaggatgttaccatcctagcatctgcagtgagtgctccgctcatgtaatttgcagcataagatatctgacctcaaatacaagattgcggcaatagtttactgtgctaaaatcacaaatatcattaacgcaggatatggacggcacaaaattctactgggccaggaagaatacggaaatgcaaattccgaaatgatgtactctcttgtctggggaaacatctcgacagccgtctgcaaaatctcggcggcaatattactacaccgggcggtagagatcacaactttcagagtatgttcaatactgctgacggcattcggatcggtggtatcacttgcttggatcgtgctgttagaaacgacctgcatcccttctcgactgttaccaaagataggagtggctggtggaggtgggtactatctaatattttctatcagcaggatttgttcaactgatggattgcagtgctatcaattctactctatgttcaccttgcaggtaatgcgaccattgtcgtatggacgcgggatgctcctctccaaaaaaggctgattggttgtgctttttgtgggtcgattgccctgtaagttgaatcaagttgttatgtttttaggatgaagaatagaattaacgtgaattgtgatagagctgtaccagtggttattatcaaatgcacgaatctcaaggctctcgctgttgggcatgacatgacatgtgagctttccctttggggagagggggtcttgaaaccgacctatgtccaatccattttctgaggggaaagagctgatgattgattagatacgatggccccattgctaatatggataaagtgagatcattcgtctgatctagtgaagcacagctaacacttgccggttagcttggaattctgcgtcttttctatcgtttcaagcctggggcctcttcgtatgacctttttcaaggcgaatgagcccgaaggcaacactacaaaaagtatcaatacagtgagtaagtgcttctttcctcagctggtcaaagactcacagacttttgtggtaccactatagtaaggctttgagttgatcccaggcgctcggcaatactatcaaatcacaactcggggggaaggcatggactggagcctattcacatttttcatgacttgttggctactctatttggtttgatgtaaaacgaggttggttcatctcccagtgagggaacagcataccgcatccctccacgtatcagcgcatcttttataagataacgatttttgaagccatcgttgatcaaatctagcacattgtctcagcggttaaacgagcacataattctgtatgcggcatccacaaagtgatctattatcttggcaacagatcgcggaactgtctggatattgagcgatgtgttgctctctatcaaaggccgtgaagcggagagtcatggagtggaaggcatataatgagacgccttctgaatgaagaacatgtattttccaagttttctatctcattcaggaacgattctttctatataaaacactaatatatagctttctatagcaccattatattcaatcctataggattgtgcacgccctcaaagcccatacgcattcgctccaatctatgcccaattcacctaatgcccggctgctgtctttcggatatgccaatttgcaggttgcaaaatattttggatcctttacgaatgatgaccgagctcagattcacatcctgtctaatacaaataaccgccaacccagaaatgttcaaaattcaataagagtggttggtagagctccgcatcaaccgcggttatgaccgctgcggtgcgtttaggtaaccgcgaaaacgcggttgaggtttgggattttcctatatgcggtcgctcaggccacatccagaaaccgcacatggtcaacagcgggtagaccgcggttgggcaaacgggccaaacagccaagaccccatgaattatacatattttatgcagaccacgacacttggatagtataaaagctgataaacatgtaatcctagatctggattctttatgaactcaagataactgagcttttcagcaattttgtgcgcctgacgatagcttaattaggctagttatgtatttgcggtctctctgcggttgaccgcagtctgaccatgcgtttttttagtgcggtacggtgggaattttgcttaaccatagttagcgcggttggggggtgcggttgggctttgccttcccatgcactggttgtgacgaggtccatggtggtgtgacagttcagggactgggagcagaagaggtcgacattggaagaaaaaactgggtaaattggcctgaggccttttaagtcgtagaggaagatggggatctcagccttctcccaaacttctttcctttccttctcatcttgctttcttcgtatcgaacgacccagaattcaactgaatttattggaaattgcctcatcacaagtgggcaaaatttccaaatgggtaataccctttcctatcgcacgatcacaggtaatctttaattgtcaaacacattacgcttttctccgagggcagcgctatttcgtttttgagtataaacataactcaaaatggacttattaggaagatgggccaggtcgggttttcttcattggattttgggtaataccatctgattcgaaaaggcggctacaggaggaaccgcttggtcaaagtcatgtaatcaagcagcagattgatgtatcgaatgtctccgcgatggcctgccatccataggcttgaacgcggttttccgccgacccagtgcactggaaaattcgttctctgcgcaagcaatgattctatcacgtcagaattttcgaagtttgacggcgtcggccagaacagcggtaagtttcttttggtctccgacgtgcatataatagtgacttcagaatttctaaaagaggctctgattctccctccagggggattttttttccaccagacgggggaaaggtttcaatgtttccaagcaagtctcgcttcgcttttttaacctcctgaaaccatatagttgtcgctgaatattggattcgacaaaattaagacttcattctccagtggcctttcaactgactgagtccggtgggtgtactcatccacgatcgcctgggttaccaacatatagggtaggacatcacggattatcaattaactataccacaaactcaacccgtgaatatcttcctaatgatacattgtgatcaaaatatgtctggtttcctcataagctgcgacgacctttttattcccaaggggccgattgaatttatggtcaaaagttgcatatagaagcaagctaacggcacgaaaaggtttcaataatcaatgcgagtggcaatagccacggccagaggggtcacattcgtttgagttgacgatttgcccaatgaccctcaattatcatcaatttgatgtcggccaaccactttgccaacgttgtcatgctcggcagaacttgttgctttttgtatccagctccgaggctatgtggttgaaaagcaaggccaacaaaacaagaactagcagtcatccacctcgttccatagcagggcgttagtggagttcagccagcatgatcaagaacaataagtctagtaaatgctggtctttcatcaaacagccaagcttgaaattggtttctagctatggactttcgaaccctagaagtaagaagcggaatgagctaggacggaaagagctggtggccgctggaattcagaaaatacttcgctagaactcctgcgcgaaaatccggggtaacaatttaactgtgccgattgatcagccctatgtctccaccgggctggcgggtagttctgtgtaagacccacgactgctgctacaaccgctaaaatatatcccggcatctgctcgaggaacaccgccgacaaccccacagcaggttgatgttgaagcgcgtaacttcttctaaacaggtagccaggtgcacatatgaagtcttccaacgcccagatgccgtagttctcgaggaggtcgaggaagaattgggcgtccgttttgaccgaatcaactccgacggtgttgaggtaactatagaattcctcgtagaatcgctggatatcatcgggatctatggcaagaatcttgccctcgggaatattttgtgcaattgggccattggagctgggatctttgacttgtacttccttggtcttgtactttcgagcgaggtcgccatcaggactgattccaccccaatacccgaacaaggcatgccaaactgccacatgctgaatattagggtttttctggcggatttcgtcaacggttcgtttaagacctcctgggaaggctttttcgtttgcctcgaaccgctgccaccgtcttctgaattgggactcgccttcgttgtcgagactctgccagttgtcgtcgataatcagattcgagatgctgatgccgtgagacttcaaagattccaaggattggagaagtttttcctccgttagatcctgccccaggctattccaagtacaaaatgtcaagtcatcaaaccactcagccagccattgtattttcgggtctttctcaacaaagacaatatcatcatcgagaggagatatcggagacgtctcttcccaatcatccattgaagagtctgagaatggcttgaccaccttccgcgactcatagattaaagcagacatagcgacttcaaagtcttccgcaacagcagccaagacattgaattgggcggatttcgtgttatcgttcctggccttgatcacgacctcgccattatcgccagactgaaaaaccgtcaagacatcgttgatacctgaaatggctagcaaaacgagattcagaccatctttgcgcaggaaagagcatagtatcgcatcttccgtcaaatcaaaccagtctctaccatgtcgtggccccagccacggactccaaacccgcaccaaggaaaagttcctcattattgaagaaggggtaccgagaagaagagtactgattccggatgctccatttgctgctgcagacacatttcctgatattgaccatagtagagaaccgggggcctcgctggtccgtgactcgacttggatatcttgcgaaaggttggtgatatattttgcgagctcttctttccgaacctgagaggggaaataaggtgatagcgctttcttgattccggattcgcgggcagtgtatacgatttccccatcaccgaccgaatgatgagggtttacccattgccaatcggtttcggggcttgtgcgaaagcgcaccgtgaattgtgcatgcccaccgactgaagggagttgaatctgtcctgcgaatatgtggcgataatacctatattctgtggcgtttccactaagcaaaggcgcggctgactgtttggtttcgtgcagtggcagcgccgtccagtctggatcggagatgttatgccagatttgagcttcccagggttgatctggtagagatgtgcttgattcgatggtgacggtgaagcgcacctagtccagcctttaatactcgatctttgtttattgtattattgtacccaagacagctgattagtactcaccgtatcgccatggtccttctccgaccgcaacttcttttggactctgggaatgctggttacttgacccagtggagggtagcacgtcacacgggcgaaaagaaccatctggaccgggcgagcaaagtgcgggctctgatgtttcgtagaatcgccaggtccgattatggggagattggaggtatttctgtcaatttgctcatgcatgatcggatgggaggggtaagctcccagctctctcgggtgcagggattagattaagctgtagctagccgattagcgagcgtcgagttgagaaatcgaccaggccggacccgatagctgtgaactttggacgaatgacaaaagatgaagagggagagggcccggggatcttgtgatgtgctgagggaagcagcggggaaccttcctcaacgtctttgactcttcggcttctgtgcgctacactgcatcctatctactatctaccttacgatgttcgatcttctttgttccatgcacggagatggagtatctgtagcattgcttttgtagctgagtattccttttgcacttcctacttgatttctagtgaatcctgacagccaccttgccaaagtgcttttgagcccactatttcccagttagtacagatatccttttacacccaggagggaacagttcacttcacttaccatgtgttcatacgcatcccgggtttcagccagagaaaagaccttatggtccacaacagggtgaatatcattggcttcgatcgcgcgaatcatatcccgcatcagcgccttgctcccaacataaacaccgcgaaccgtgcagatgttgctcagagtatctagaacgctaggctgatcagcaggactgacaccacccaagaatccaatcacactgatcactccctcgaatttgatggccttgaagctttgcttcagggtgccacttccaccgacttcgatgatgtggtccacgccggcaccatccggggtcaacgcgcgagcagtctcgccccagttcgggtcggtcctatagttgattatgtgatccgcacccagttgcttgagtttcttagctttctcgtcggatgaggtcgtggcgatcacgatcgcacccgcagctttggcaaactaaccctcacggatattgattagccaagctgctctttgataactggccgttagctaccatgggcgaagcaatcacttacctgaagagcgaagatgctcacaccgccagttccctggactagaacgacctggccaggcttcaacggccttaggtcgtacagcgcattccagcttgtcagagccgcgcatgtcagagtactattctcaactggtgagaggttcttcgcagccttgacaagacccttctcggcgaaagcgccgtattcgcgaatggtgccgtcgattacgccgcctagtccggtctgtgtcgcgggaatatcgatcgggccatattggtgaccctggttgaagagcgtcgcaactttgtcgcccttcttgaactcggtgaccttggagccgacctcaatgacctcgccagcgccgtcggagcccgggaccacagggaaaccagaagggaagggatatttaccctgtgttgtggtgtggtgcaattagttaactgtcaaactgggttgctctatcgtgctggtattcttaccaagggaatgattaagtctcggtagttgagcgaggcagcctgaagcttgaccagcacctctgattcaccgatagttgggaggggcgcgtccttgaaggcaaggccgtcgaagccattgtccttgttctcgactacccattgcttcatggttgaggggaccattgttttgtacgacaattcaattgtaatttggttggattttggagagagagaggatgtgtagagaaattggcagttgcgatgagttgaggtgggactcggaggggcatatgaggtcttctataaatgcccgcgaattgacgtgggcgatctaccgattattacgtcgaagatagggagtacaggtggtctaggctgttctcgggcagatgagagaccgttctcggacacatttcaatgctgatcaatcccggttcatcctgaccataaccatccatggcttatcctaggctcatgacgtcaggagtatggcgttatgacaatgatacattgttagaaaaaggagagaaggtgatctagaagagcctctatgttatttagtactaaatgatatggcaattttaatatgtaaaatctattccaatcaaattacacgcccgtcatgtccactcttccccagttggatgtttttatctactctgtgttgaaaatagatattaacctgtcaccgctggaaccattcgccttttcttctcggcgttcgggttttgaaaactttaaattagttctttattctccaaatatagcgcaattggactaacctgtgcggaacatcaaaacgtaagttactccggagcttttgcttttcgttgttacttcggcggagcggagcttcgggatctgaaaacatggacccactgggaattctcttggtcctgcggttattgcaagttgcagaatgagaaaatgacggcagtcagcatggaatttgtatcaataaattaataaactataaagctatcggagagatatttcaagtttacaagatagctctgatcaagtacagttccgtagacattctatgctagcctcgcacttaaactatcccatggattaacgatgatccgcttatcgcgacaatctcggagctggcctgatcgccggccatttttggtctccgcgactcattcctccaattttccactggaacgccctccctccttacccatttcacatcaatcggtcccatgcgacctcggtcaacgcctcttgttcgcgcgacttgtcgcaacgcgcccctacctcgaaccgcgtcatgcggagcacgtagcttcgccgcagcatcgcaaacaaatccgctccgttgcgagacccgtcgcccggctctgttttttcaacaatcccagtgtacaccgcagcagaagaggctaatcacgcaacaatggctgaagcgcgttcaggatggcaaagatgagtgggctcggcatgcggaggagattaacgagggcaagaggaagagcttcgcggctcatctggaagaacgcgggttgattcatgatgttgttgggtatgttgtgagctggaatttattcggggtcctcttctgcatgagttaattgggaaacaagtactaattgtccatttctgatctttccagagaacgcgatttgcttcatcaggtgttcaccgagaagagggtcggtatctacgtcggaattgaccctacggcgccatctatgcacgtgggacatatgttgccgtttatggtcctggcttggggatatgtttggggcttgcctgtcacctttttggtgagtttctttgggcctgagagtctcttgaaatggctgactgacacaaaatagttgggtggcgctacatctcgagttggtgaccccacaggtcgactaaagggccgcgaaaaagttcatacctcgattcgcaaggcaaacatggctagcatgcacatgcaattgaagaagctgggcactagcattgagcagtacggcaggagacacggttatcagaaacaggctatctggagacgagcgttggtcaacaataacacttggtggaattcaatgcctttcattgaggtcctgcgcgatctgggcgccttcactaggctgggacctatgcttggccgagacacgtgagtcttatcaatgcaatttggctgttcagttgaactaacaattatattcagtgtcaagaatcggatgaaccagggcgatggcatgtcttttgctgagttctcctaccctcttctccaaggctgggactggtggaacctgttccagaagggtactcaagtgcaagtgggtggatctgatcagtatggaaacatcctgttcggtatggatgccgtcaagtcaattagccgtaacactgccgatgagcaaaaacgtaatcctttggactcggaactggaccgacccattggctttacaacgcctctcttgacagcctcgtctggagagaagttcggaaagtccgctggtaatgcaatttggctcgacaagagcatgactaccactttcgagctttaccaggttagtttactcgttccatgaagcttctgtttcgtctagagctaattattttccagttcttcgtccgcacccctgatgatactgtggagcgctaccttaagttgttcactttcatccccctacctgagattcatagagctcccaagcttgagcgtaggagcgggatgcggactggggggctgtgcggttatccttcttcccaaattctaatcgcgtttataggacatgaatatcggttgcccgacccccgcagtaattgcgcgtagtgtgtcaagaccgtgtgatttgaattgtgaatctctttacgcgaagcctcacccaatcactgggaaggtcagattgtggagtcttcttggcatcccacacgccgtccttcaaatgccatttgaattattatttcacgcacaggtatgcgatttagacatcagtttgctcgggtgctgggaacgtagtatcacggttgttacgactgaatcatttcgtacgatcatcaggtaaatggttctattctggccgttctatgaattctcaagagttggttgatctatgattcaactgctgtaaattcggtggcttggatcttccaatcatcacgaactcggtaattttctccggatagcccaataaagcgcaagtcatgttatggatataacactggttatttccattgccctgaaatattcaatttcgatataggaaatgattgacagagctaagttgttgggtgcgtcttcgaatgtctgctgttgcccggcggccggggcgtcgaaactgttaagagtggatacttcgtattgtaagtgaaagtggcatcgaagttttcctagtgccgatggttcatacaacacctaactagttgattacatctcgctgaatcttaactagttataggaactgctgaatctgcaggacgctcttactcactctagactattttccatgtatttaaaaacacatttcaaatgctgtgcaaatggcctcatgccttgttaaagtactagtacatactgcaacggattcgacacgcattcatggataatagggttttgcatgaatcgtgggcacgtgaagacattacggaaaacacggccccaaatgtgtcatgcttttcaaatcccgaacatgcgccattttctggatagaccaacccccttggcagaatcacaggggtcggacaagagacgggaagtgaccgttttagcgtccgacaacctagggtgaatctagggggtagaatccagagaaatcatttgacatgcgttacacacagtgacacaacaaaagcctgtaacatatctgtcgattcgtaggatatccgtagaagctagtaccgagggaaccaattgtcatgattgagagcgtctcatagcctcaggggctagtattggcatgttacaatatggatattccgaattaacccggtttaccatacaaaaacatattgaatgatggatcgctgaatcagcctgtccttattggtaactaagttatctcagtacctcagccgctccacgtgacaatggtggcggtataccgccttctgtttcgagcgattgttgaatcagcttttttgtggaacgtctgagctcaaactagtatggccccttataatttatcggcaaaatagcggtcaacactaccaaattcatcgggaaccatattctttaatctaccagaacaatcgccacaacggtgatatcgaaaatcgagcgatcacgtcttctagatattgacgagctgaatacgttgatctaatttttttgacgcgaaacggtcgattggggttggtgtgacacggtaaagtattgcttgaaacccccatacaaactttgaacctcgctggtggtacgaaacatgagaataaacactaacaatttaatatatatatatatatcaggcaattctatacggtttcaaaggtcaatacagatcgattacgttgttttgtggttgggatacgcattgtagtcatgcgtccacagaggaaaccgcctcggtactggcagcgcctccggaacaaccgcacccgcgagcaattgtcatctgatattaggcctggggatcataattctgcagcagttcaaggcgatcgggaagcagttctaatgacactggcctgtttggactttggacactgagttcgaaaaagctgacgtggtataacctctcgcattccttccgagcagataaagcaggcacaggatattatcatccgggctgtcagggaaaatcgaccctctcagatgaaggcaatagaggaagcaattgcaactctgtacccctacaacgcgaagcccggtcagcgggaggcacttcatcatcttatataccaccgcaaggatctcatacttattgcgggtactggatttgggaaaagcatcattctgcaagctgtttcggtcctcctccagaagtcaacaacgattgtcatactccctctggaccaaatcggcaacgagcagtcggattacattcgacaaattggtggcataccgtgctttttgaataaagacacaatttgccccaaacttctcaatgaagtacaacatggatgctttacccatgttttggttagcccagaacttgcaattggtgaccaatttcgacctgtggccagtagtccatctttcaaacaacaagtgagcttggtggttgttgatgaggcccatctcgtgcatcattggggtcgaaactttcgggctgcatattctcgtctgaatctgctgcggagttggttgggcagtcaaataccctggtttgcctgctctgctacattggatcccgaaacactggaatcactcaaaagcggtatcagtttcgatccagatgttaaggttcagcggacgtctattgatcgacccgagcttctatttcgaattggctggattccgaagaaagcaggatacaaaccattacggtttctgttcgctgctgatgagaaaaccacggaatcagtataccagagactcagtgagattccaaagacaatcatcttcttcgacagcagaaaggatgcacatactgcagcagaggagtgtcaggcctggctgcaagacatcaagcctgagtggacatatgacaatgtgacgcagtcactgaaaacgttccatcgcaacacagcatctgcgaacaaagacgctattctgactgaatttgggaaggaaggggcccgatctcaggtccgagttatctttgccacagaggctctcgggatgggcgtagaccttcgagacattcgtcggaccgttcaatggggcgtccctataggagaacatgctgctactcagctgcaacgaggcggtcgagcgagccgagataagctggatggtgagatgatcatgctacttcctgaatgggtttccggcgagcgttcctctgggccgaaacaaaggaggagtcagaagcaaggccaagggcctcctgttattgatgcaatcgacactggattaaaacctgaagaagaggcccggaaagcaaagaaattgactgataaacaacgtcgtgatcacatatccgacttctggtataacctagcgaattccgaacgcaaggaccctccaatgtgcatccgtcgccaatttctggatttctttgatgagcgaaacgaatatcagtcagggagacgccccaaccgctgttgcagtaactgcaacccccacaatcgactcggaaagctggatggcttctatcaatatcacgaactcggccctcaggcaaatcaacgaacaagacgagtatctgaagctctttctaaatgggctgaagagcaggcctgtttgttatataaggactgtgcattcttaccagaatccgcgcttttcctatcgccagacttgcgagataagcttgcaaagaatgcacattcggttctcgacatagagagtttacggatgctcatgggtccatggtattggagaaaatcgcacgaacaggcccttttcgatatcatctggacttcatatcgtcaagcaaacgccaagactccaagtactcaggccagtcggtcacagactcccgggttgagcagccagtctacacttattgcctgctcatttgacttatcaacgccgtctacatcatcacaggactccggcccgaggaactatcaagttgttggtttgtctccgctttctacaccattgccatgggattcgccaatgcaatcgcaggattcctgccccaatttattgagcaaggaaaccgtcaatgcatcaccactatctcgacctgtgaccttaaagcgatcagctcttgaaccaatatccggcaatatacgagggaagaaaatgtatactcggaacacctgactccacctgagccggcagtgagagtctgattcgaggttcggcagtaggaagtgggtgatatctatggattagaaacagctctttttagtacacatccagagtgatgggataaacatcacccatcaactatatcagatcatcaacgttgccatattcgacttatcctcttcaggttcctttgtaacgtaatcatccaagaccccgatggaggtcgaggctaggcctgaactatcgtcaagttcatcacctgtccattgcccatgaaccaccagcttgttgaatcgtatgaccccattgacaatcagcgcacaacctcgggatacaatatctggtggttgaaatggagaatctctgccatccttgcgctcatcaatagaacctgaactgtatatctgaaaggctaggtttcgcacatcatcgctcacatcctttgctgtatgtgtgctgttggtatgttcaccaaaggcctgttcaatggactccttcaggtccgtacagtaactagctgttaaagcagtggtccgaaataacgtagcaacatcaatgctcgatgtgcgccgagtggccataagagtcttcatttgtagattgaagaattcattcagacggtccatctcgaaccaactatcctcggctccgcggaggttgacaagcccatttgccaaaatagcatgttgcaattcttgatcggcagcaggagtctgtgttatccatgtcatataaagagacaagaaggcatatttggacttattactgccatggaaaagaagacaacaccgagcaaaagcccggcgtattatgcctatgtcagcccgcttaatggcaagcttaagagtcttgtagatttccatttgttgaaggaactttgcgtgggctgagtattcaacgtcaactggggcaccttgaggctggggtttgtttcgatttgcagaacttgactgctccgtggatgctctgggtggtttcgggacagatttgtattgcttgtcaaaagcaaacatagattctcgtatcttctcaattgtgttaaggaactcggcccggcccgattgacgaatatagaggtcaacttcttgatgatattgtcgtttgacacctggaggaaggaactggtagtatagagcagtcactcgggcgttaaaagcatggattgcaacctctaccttgtgatgaaatggacttttatggccctggacgcagccatgaagttcttattgtggtgtaacgtacaaccgatagaagcactctcaagaccggaatagagatcatgaatcatatccatgtaattggtacgccaatgaaaaaggccggggatgggtaaaatccagtcatgcttgtcatatgagagtgtagacccccggcgttctttctggacggcccggatcaacgaaatggttttttgatccccaaacaccagatgcaagatgtcattgaaatcactagacggatcgtacccaagttgatctgtaaagaccttgtcgatcacattgtaagtgccatctatagtgccttcattctcaagaattggtccgagactgtagtgcatcgtcttctgaggtaacaggcgttcaacacatgggaattgcggccactcaacaagctcatcggtaaagacatcatggatagcatcacgatgtgtatagcgaatagcttcagcaatccaatatcgttgtgtctgatgaagtatctcatcatcccggttaccgggcattaaacagacgtcgtttgggtccaatgagagatgtggatgaaacatagacttgcgtagaccaccacctggcatattatgactgatacgcagcttgcctgttgttgcacatatgtgttgcgctgggttccgaagactctgatgccgaacagtctcactgtaattgtcaccttttagcggcagaccttcggtgcctgaaacctaaggttgaaccacacccccccggggnnnnnnnnnnnnnnnnnnnnnnnnnnnnnnnnnnnnnnnnnnnnnnnnnnnnnnnnnnnnnnnnnnnnnnnnnnnnnnnnnnnnnnnnnnnnnnnnnnnnnnnnnnnnnnnnnnnnnnnnnnnnnnnnnnnnnnnnnnnnnnnnnnnnnnnnnnnnnnnnnnnnnnnnnnnnnnnnnnnnnnnnnnnnnnnnnnnnnnnnnnnnnnnnnnnnnnnnnnnnnnnnnnnnnnnnnnnnnnnnnnnnnnnnnnnnnnnnnnnnnnnnnnnnnnnnnnnnnnnnnnnnnnnnnnnnnnnnnnnnnnnnnnnnnnnnnnnnnnnnnnnnnnnnnnnnnnnnnnnnnnnnnnnnnnnnnnnnnnnnnnnnnnnnnnnnnnnnnnnnnnnnnnnnnnnnnnnnnnnnnnnnnnnnnnnnnnnnnnnnnnnnnnnnnnnnnnnnnnnnnnnnnnnntccggcggtcaacggagtttgcttgtcaacgaagcttttttttattttttaggtattttaacccacaacgccaaatatataaacaattaactataatcctcttctaggttaggcaataacggagggtgttcgacctcgaaattgtctaatcttgcgcgagaagcatcgctcatggccgcataaggtagtggattgcgtaactccgtaagcgcttccttgatctcttctgccttttttcggtcacgaatgtggcgatttgcatctttagtggatagggcaccaaatttgcctatttgcttttgcgacttgcgtgcaattttgcgttgtttaggcaatctattctctagggtatcctgtagtaggcctttatcctccgcaagctgaatctgggattgggcaacacgaagcaattggtcacgtatatcagccggaagaggtgatttatcaagtatattgaccattttattgcgtgttcgacgtgcatcccatacagatttaggtggtgtataagggatactagatatttgctctggtggtggtgtaccatcaaatatcttgagatccggctcaggggtttgtgcagccaccaaaggctcaataactagcttaggattgtaaggatagataccacgtgtagcaaatgccttccgaatagtacgtggtgtcattgctgttgcacgaattgcggttatttcagtaaaaaagaccgatatatcgcgggcatcaccaccccattgagcaatctcgttatttttagttcgatacgcttgtttcagcgctcgaaaaggagacccatcaagtggttgaataaggtgggttgtatgaggcgggcagacgtatggaataatattgtagaagtcacaaatatccaaaaattcgtaggtgagatgactgccatgtccatccatgatcaataggcggggctcttttgtactttttcctaggcgatggctcgtattttcggcaaagaagtgcagccaatcgattgccagtagatcattcgaatatccagaatccgaaacagcgattcgtgtctcctcagagagctttccaccatcataccatctgactagatgggccttccccggagcaacaaaatatggctccataacccaaccatcggctgcaacgcattcaattccggtaaccaattggcctctttcaaatgaatgggttctggtacggtgcttattggctgaaataacgttttgaggcctgccctggccaagcagaaagccagtttcgtcaaaattgtatatatttttggtcggaatgcgcttgataaatggctctaaacggtcataccatgccgttaaaacaccaatatcctcagcaaggatacgcttttgatccgcaggcttctgttgcacccaaaaaaggtcttccggtaggtgttgagccacaaaatcgtacacccaatcttttgcaagtggacgtgcgtctgaattggccctgcgtagtaatgcatttgccgatatagccaccattttagccgtaggtggtacatgtaggttatcaaggcacctaatccagcgtaccaatgaggctatttgatcctcatttaggcgggtgtaggtcatttgacgagtactacgagactttcgaccggcaaagcgtgcccgcaatcggccaacgggaacctcatattcacgcgccaatgcagcgaagttaggctttttggaggttctagcaactgagcaagcagtcaaaatacgccgttcaacatctgaatagggtttatccatggtggtggtagttgtaggtagtaaaataggagcaaaagctttgttgacaagcgaactccgttgaccgccggttgacccgcgcccccnnnnnnnnnnnnnnnnnnnnnnnnnnnnnnnnnnnnnnnnnnnnnnnnnnnnnnnnnnnnnnnnnnnnnnnnnnnnnnnnnnnnnnnnnnnnnnnnnnnnnnnnnnnnnnnnnnnnnnnnnnnnnnnnnnnnnnnnnnnnnnnnnnnnnnnnnnnnnnnnnnnnnnnnnnnnnnnnnnnnnnnnnnnnnnnnnnnnnnnnnnnnnnnnnnnnnnnnnnnnnnnnnnnnnnngtttttgtttcaaccttaggtttcaggcaccgaaggtctgccgctaaaaggtgacaattatctctaattacacattctgtaaatcaatgtatttaacgactctcataagtatttatattcaatagggaaactaaagactactgcccgagacctaaatagcacctcctctaaacaactaaacaaagataatttgaaaacattatgtcgcttttcgtgaccgggagcgtgggaatcggttcgtatgtgaatattgaaaggttttggtggcataatcgtaacttgtccgccatgtctgaatgtgcgtctgggcagacccggaatttttcggaattggttggatagttcatgcgcgttttcgcgggcgtgatgttgagtatcgcggtggtcaaagcttatcgcgggactagcgatggacatttaaatagatggggctcccacctttgatagtaacctcaacaagaacattacaactacctatctcaacaggttatgagcccggatggcttcacctttgggcactcaagaatctaaacagcaacaatactttgcctgccattacagctaagcttctctatcagagactaactctatgagcttcagaaactgatcatatattctcagtaacttgatgaacaatatgaagtcctattgctcaaaccctctgggagcaataacgcgtttggactttccttcaccaaagaattacagacatcatgccatcattgctactgttacactgtcacactggcacggagtatcgcagggttgccccatagccggcgcatgtcaccgtttgcagcaagcttcaaacgttcctctgccaaatgatcataggtattacaccattattgctacggttacactatcgcactggcacggggtaccttcgagttgtacctacagctgggacatgtcaccatttccagcaaactcagaaactatcttcttggggccactgaccacagggccacctcaattccggaataaaaatgcggggaaaattacaaaagagacacttcgcgtcgtacctccgacacactcgccactggcgcttcaaacaaatccaaacgtcatacttcccatcactttctccgagcgcactcttgggagcctactggcgcctgtccactgaagaccgcatacgccgagcatcgaggaccaccatcccaatcaccgctcctcgcaacactgtgaaagacttcccaagtgcccccaaagctcaacctgcgcgttccagtatcgagcaagggacaagtcgctacagttgctccgcctctggcactctcacccggtcagaaaacaccattgagagtttggtcttggccccaccaagccctgcgggtggaggagagccattcatttccaataacagcaactcgagtcgttacaacctccggccaaacagaccctcaagcttccctccaaggaagccgggatatctagttgaccgacaccgtttccctcacttctctagatcgtataagtactctctcgatctacacaggttgtcagacagcgactatactcctccatctcagacgcctacgccaagttcatcagaccgaagcgtttccattgtttcaagccttcccagtaccgcgtcaagccttgaactcttcggcttggaggtgcgctctcttcagtcatcagatcgtgaatcggttacctctgatcggcccaacgacgtatctagccctgacttcttcagctccgaggagcatccattgccaacatgactgaaatcacaaaattcgagcaatttggaatcaatacgttttataatggaatcccgatactggataatgccagcgactggtttcggtggaatcagaaggtcaatgagttcattcggatatctgccgttgccgacgatggggcgactccaccgatagaagaagaagaagcacggcaatggattcaccgccaaaagttctattctgcgatgatcacggcaaagctgacacacaatgcggcgcaaaggatcaatgcctttgagattcctcgagttcaagtactgcttaaggcagtcaaggacaacttcaaaccagaaggctccggcacgtatgttactctccaacagcgatacatggcccttacaagagacaagtgtgggagcactcaagccctcggagccgagatcaggaagatccatgctgaaaaactcctccttgaccctgattgtgtaacctccgaaattgagcgaacatttttctttgtgcatgcactcggtccggagtacgagagcttccgcgatcatatcttccgacaaatggaccttgtcaatgaaagggacgcaaacgggaatgttacgaaagcggcgcccacgttcgactatatcgagaataaagcaattgaggaagaacataggaagggacagttgggcaaacaaacaacggagacgcaagcacttcctgctcttgccctggtccgtgggccaggtgacaagaagctcatcccgtcgtcggacggaactacttgtcgaatcgagatcgataacgtcccatattgctccttctgccgaaaaccttatcacgttgactccgaatgtttcaccaagaatccgaaactgaaacagaaagacggagatggaccgaagccaaagacaggcagaatacacacaggcgcacgcaaacagtcgaagaggcgaccttcgacggatgacgaggatgacgatgcgggtggcccaaaggatccgaagaaaccaactttcatggcgacgaaagtatccgagaaagatgtcaacgaagcatttggaaacgatatcgagggcaatttcgccatgctcgaccatattcccataatgatggcgataaagaccctctctacccgcgacgcgtggatcatggatagcggatgcgctcagcacgtctgcaatagtgcctcgaagtttgtccaaatggccaagtatcatggcccctcactaagaggcgttgacacctcaacggctccctcgggagtgggaacagtgaatatcctgtgcaatgtacgcggcagaaagaaatggcttgtgcttgataacgtcctctatgttccatctgcacacgccaatctcatatcggtgctccagcttctcaaacgaggggcaaaagtcgaattctcaagccgggatgctatccttcgcaacaagtcaaatggaaagaacctgtttactgccagcgaatatcatggagtctacgcacttgatctgtgggcaagtctgactttcccctcttaccatgttagcccgcaaatgtctctgtggcataatcggcttgctcatatgagtgatgcgaatcttcggcggatcaaaaagcaggctcacggtgttcgggacatggagccacttcatccatgtaattcgtgcctgcaggggcgaatgatcgaaaaaccccaccgcagatcaggaagtagcaggagaggagaatacgcaatggagctcctccatattgacgtcgcagggccatttgacgagggccttgacggcagtcgttactggctcaccatcgttgacgacttcacgagctagatcgagattatccctataccacgaagacaagagttcgtcatagaatcactgcggttcttcctcgaccacaacgagcgccccgagcgaaaatgcaagcgaatacgtctcgaccggatatctgaacaaatgggagacgagatgaagttcatgttgttctcgcgcgcaattcaagctgaggtgacaggcgtggatcaacatcagcagaatggggttgccgaaagagcccgtaagactatctatgaccgcattggacctactctagcacatgcaaggttgccgtctaagttctggccggaaattgctcgaaccgcagcgttcctctcaaatcggtcgccgtcatcgaaactcaacatgactccgtaccaagcgtggtacggcgacagacctgacctctcaagacttagagtgatcggatcaaagggggaatacttgatcccgccaaagcagagaaagaagctcacggatccgcgaacaagaccatgcattttgctgggttatgagggaaatacctactaccgtatcctactgggagacggaagaatcgttggaactccaaacgctgaatttcaagaagtccttacaactccctccacacagactatggaagatgtgggagccagacaagacggcttacttgaggcaacggctgctgccgcaggagggagtgagacggtgggactaataaaccaaccgtcggtaggtatacggcaagcatccgtgcctgcttcggggtaccaattgtcgatggatcccccagagcggcccctacctaagccgagaaacgatatctcgcacacactgcctcggagtgacgagaactcgcgagtgcttacccagccgagtgacgataactcgcaaactcaagcgtcggcccaatcgagtgacgatgactcgcagccagctgttgctgtacagggagacaggaccttgtcgtccacacggagtgacgataccctcggacctctatcacctgcctatcaggattctgtccttgggactgacttaccgtccggtggcgaccagcaacagggcgacgcggttgctgcacagggagacataaccttatcgtccacacggagagggaacaccctcgggccactatcacctgattatcaggattctgtccttgggattgattcaccatccggtggcgaccagcaacaccaacgagggccaatcttagaatggcaacgatattcagagctccatcggccagtccatgaagttcaacaaggaacattagattaccaccctgaactaaaacttcgggcttcggaagccacattggacaatcctgatggggacgaagagcttgcgctcatgaacgtacctgaagagaacgtcattccaaccttcttggccatggctgcaaaggagacggaaccattcgaacccaaaagtctgagccaagcaaaaaaaaaaaaacgacgcaagctggatggattgggaaagagccatgcttgaggaagtgaattcactccaccaaaatcaaacgtgggagcttgtggatcctcccaaagatcggcggttgctcagcggtaaatgggtcttcaaactcaagcgcgggccgcatggcgaaatcatccgccacaaaagccgatgggtagtgagaggattcacacaagaagaagggattgactatgaagaaactttcgcatcggttgtcaagccaatgagctacaaggctctcttcgccatcggagcggccctggatttggagattgaacaaatggatgtcaaaaccgcattcttgtacggaaatatcgaccacgagatctacgtcgaacagccccaccatatgacggacggcacgccaagggtctgcaagcttcgaaaggccctctatggcttgaagcaggcccctcggatctggtaccagactctgacaaacttccttcgcagccttggcttcgagccaatcaccgccgatctcggtatcttcgtccggagcagtgtgtacatcgcaatatacgttgatgatctcctgatcgtgggtccgagcatcgctgagatcaagaggatcaagcggagcctgagaaaccggtttcagatgacggacctgggcccatgcagctactatctcggggtgtccatccagcgagaccgtcaaaacaggagactgctcctaagccaagaggcatacattgacaatatcgctcatcaatttggaattgacaactgcgctcccgtcagtacgccgatcgaaacctcaccacttccggaaaatagtccagactacacctgctctccagatcaaaggacctcttaccaacgcattgtcggatcactgatgtatatcatgcttggaaccaggggggacatcgcgtatgcggtctctgtcgctagcagatctctctcaaaccctgggccccagcacatgaaactggcccgtcgcatcctgcggtacctcaaaggaacaaagaacctcagactcacctaccaaggtcagcttcagacactgagaggcttcacagatgcggattggggagggtgtcgcgccacgagacgatccacagcgggctatctcttcaaaattggaagcggggcaatcagttggcaatcgaaacgccagggcgttgttgccctttcaacctgcgaagccgagtttctagggcaaacgcaagccaccaaagaagcagtctggctgagaagacttctcaatgaattgaatatggatcaaggaacaaccgccacgatcatctgcggtgataaccaaggtgccatcgcacttgcttcaaatccacaataccactcccgcacaaaacatatggaaatccaacgcaagtggcagggagaggtccaagacaacggaacagtgaagctcaaatatatcccaaccacagaacaaattgctgatgggttcaccaaaccccttgctcgggaaagatttgagtggtttcggaaagggcttggcatcgagtgattgctacaccttatttatattgaacaagactaaggcgcagggcaccctttccttcctttcttcacaaatgaagttttttgaaggttttaatgggacctgtcgcaaccgcgagcatatggtcgctgacaccattgggaatgggttgtcatcgagtgggagtgttgagtatcgcggtggtcaaagcttatggcgggactagcgatggacatttaaatagatggggctcccacttttgatagtaacctcaacaagaacattacaactacctatctcaacaatccatattcgcggagtgcgaatatgaatatgtcgtttattcgcattcctttattcctttcggagccctagctatcccagcttcagaggtatcagttgagagattatttagtgcagggagagatcttttaaaagttcgaaggtttgctttacaagcagatactatgaggatgttgacgttgatgaaggacattatttagttgattggttgaatttattgattgattggttatattaagaaggagagtaattaaaatttttaaatttgttaaactattcgagggaatactgtacatgcatggatgatatatataatggcatgtcgtagttattactactagtggttggtgaaataactgactcctgtcagaacagataataccatattacaggcgctcttaagcgtgtgcacgctttttggcctagtcgcgtattttgctgtattgcacccccatctcgcgacaactcctgactagtcaggtgactatatactaagcttaattagggtagttcgccggtctaccgatattatcggcgaaaattcatacgatatttggtaaattatcggctgctgccaatagcttcagttattatcgtttatctgtatcggctcataaaattggcgcccgataattaacggccgataataacggccagataatatcggtaaaaaccgatatcgggaacagccctaggttggggtagtttgctccattgaagtccgtcttgggtgacgtatactgggagagcgagtaaggggatgggaaccaggcatcgtcttcagcttggtctcgtacgggagcgcggtcagatgagctagacatggtaactgtgaagttcttctgaatgaataggagaagtaatgagatgatcttctttatcgaagtttggtaacaaaaccactcgagttcattgatacagggcaagggcaagactaagccttatcatcgaattgctgcctgaatgcggtctctgtccttgcccgtgatgatgtcagtgatatagtctatgacccgcacaacttgtgagaatcaattttatcagcccagaattgggaatgatctatacaccgaagtccatttaatggtatacacgggttctattattgaattcggaacgattgcaactcccctattgttcttgagacttacgaagtgcggtgttctcatgccgataaaccttgttgagcggggttcctcacgtccaaaagagaaaatatgacttcgcactcgtaatttcgaatacggcagcctctcaatgcagcaaaaggtaacgttccagactgcaaagcccaagtccgatggcaaagtccgacggacgaggtattttgcctaacggtatttgaacctactgaaaatccatctgcaggactagtgagtcggcctattctgccaccgccagtcaaacgggcgtcgccgtatatctgtctcgcccagctaccccgcttctacacttcatcccaacgccatccggcagcctatcttgactcttatgatatcatatagtactgaaacactattgccactatgatcagtgtagaaacaaatttttatctttctattgaggtatgagttggtaagatttctctatacaccctaaatctgttcgggcgtagtagagtgggctgttcccatagtaaaaaagtcttggcaaagggggggaaacaaggtcaaactcgataacctcccctctctccctctctccttaggtatattaaatcttgtacttttcaatcgggctggatctttccgtcgaataattatttatttgttaagtgttggatcccctgtactgatggtattgtcctgttaccctaatacgcactatttcctagaatttccaagttttgagtgcaatatcaatcaatattcaaaagcaggactagaataagtgtaaagaatagtatcatattttggattttgaatgccaagaccaaaattttatgcaaaactgggttcaaactgggtctaaactgggttttctgggggcctagtcactggttcggggttgggctctaggtcgtgatttaggacctaatttgggttttgcggaagcctaattgggataatagattcataccttctcgtgatatccggtgttaatccctattggggagaccaaagtgaacccaccgtggttgtacggtctggtccactacagcgcacgaccgtacaacggaaggactataagtagatcgcgtaacataagggctttggaagtatctaggggtaggtgtatattgtgaatccagctcctatggctcgagctcttagggctgagagatgtcgtcaacgtgatataggctgtcactcatctacacacgatcgaagctgtagagacctgcgttagcttacgtgggcggttgaagctgtaaacggacggaacctatgagcgaatataaacggcagtagcgagtaggatccatggggtaacacaaatgagagccatattagcctacttagtctaccagagttagtcctctgcagcagcagtacagccttcgtcatgtaagaggtaaatgaagaaaagggctgcggaggaaatgaagaaaggcaaaacagtgggcagaatcaagctagatcgccagattctcctcccgcaccttcgagaaccccgcctagaacccggcgccagctcatgtgcgcgcgctgattggctgccccctggcataataatctcggtacagatgccaagcaccatcaaaggaacaaagtggtaaacaagaaagaagaaatgaagggaaaaaaaacaataatctacagcattggcccaaggtggacactcgacgaggtaggcctaatagtatgtggacaccgggagagtgtcatgccaagcatcttgggagagtcggggctttcttggtaaagaaggaaaaagacgaggaaggaaaaagacgaagaaggcgctccactcacaatgcactgtactgagccatcgtgaatggtgagatagggccaattcgagagtggctcccacgggccccctcctctccctctcgctctggctttcgtccctggggttttgctctccttttctccctcgtcctgaccttctctcccccaagcttgaagttttcccatccgaccagagggactcgtctctctaccacattcatttttagaaaacgtctgccacctctcgatttcgaacgatttcccactttgtgtctggccagggtgtccaatgaatcatatttctcgcattgtatgacttcacatcctcagaccattcattattacaaacagcttttgacatcgcattagcatcttcactttcttcgcaatgctcctcgaaatattgtcgctttggagatctcgccggcaaggccaaagctctcatacgcttcaggagaaacaggccccggtttctcaagataacaatggcgtcgagggtacagacactggaccccgggaggtcccagaagccacgccggcgaatgtagtctgagtcatagcagacggcttttggacttcgggccaatgatagcctttttcgagagtctactggaactgctgcgcacaaaagtagttcgttgcttttcgtcttaccttcgttattggttattgttggacttcaatttgctttgtatctatcttttagatttatctccaatcgggagcgttaataattaatatatctttgactgcactaaagcttagcctcacaaagatttgccgcttggacggttgactatggactgctatgtacgtttgtttggcaattgttacgccaaccatacaaggaggtacagtggcgtaacattaatatttgacctcaggtacatcggcccctaggcccacttttatttactgcccagcagaaacctaatgaaattaatccaattcaattcaactagtagctagtatgccaccctccatatttaataacatcagctacccggtgaggcatagtctccgataaatgcgcaaaaatatcaatatctaagccctcccaaacctcctgagcggcatccaataaaagatccaatgtagcttcgtgattagagagatacttcaattcagggtgacgtttcaatagctcagcctttagtagtgcctataggttctcaatagggtttaagtcaggtgaataaggaggccattccattacctcaaagcctagctcgttcaatgtgtcccagacaagataagcagtatgcactggcgcattatcgtgttggaaaatagcatagtgaacattatgaaccaacgttggtaatacacgacgatagagttcatcaattgtccgtgatgagacaccacatcgaggagcttctgggtctccatctaatggaatcaaccctgaacgacgaggttgaccacagaatgcagcccaaaacattcgtttaacttgcttccctcgcgatggaaccatttgaacttgagggccttcgactggatggtgattaagttggtctttggacgagtgaatgtccattcctggcgtgcaccaataccacgttcacttgtacattcgtcggaaaaatagacacaagcccagcctgaaggctcaagatgttgccatcttcgagcccaacaaaggcattgctcggcatggattggctttaaagctggccgacgcatttttttccatttgcgaagacccatctggtggtgaagacgccaaattgactgacgacgaaccttaaaatcgacttccgtaagtagtttctcggtcgaaattgacggtgtttcttggataataccatatatattatctctatcatcctcagtaaactttcgaggttgacctaggcgtgggagactctcttgttttggcgttttgactcctgggtaagagtatattgtatagtagagcgtggaatatcatgaaagcgcatctttttgatagtagttgcgccccaaccattggtatgatgtagctcgcatatcttagccctagttaggcaatcgagttctgggcctcttttacgtggagtgcgtataggaggcatagtatagggtgggtagtaagatattaaatattgtataaacatcgcgtaaaatgtaagacgcgtacaaccaagaaggtaggcggtcacaagaggcggtcaaaccccctatgtacccgagatcaaatattaatgttacgccactgtatagaatatgcggaggaggcgcctatgcatcaccggagccgcctgttgatacatcacctcctcttcagcttgcatacgcacagaggcatcccctttataaggaaaagctggcccctcttaggaggaccagcgattagtctgatttctgaatatcatcatactcatgtcaggcacatctcacattcttcactcgtatccttatcgtatcaggacacctccagggactgtcttaacaaagtggcgagcttggctcatctggaaattcatcccgcagtgttacagaatgagaagggagggcatccaagccatgctgtaaaccaaggtgtcagtaactagcaacgatctgcgacaaggacgtaacaagccttgtccagtaagcagtgcgtatgtctaagaggtcccccaaaaccttcatgttcccgtaatcttgcgccttttggacagtcttctaacttgtctagttgcttgcaattatgagtcagtatgaagagggccaccgccatctgagcctctagagccaagttatccagagatttgggaagcctaccttttcgttttctccttcgaccccaatgggtatagacatgtcgctcttacactgctgacataccggggagtcgccactgcacttcgttttgtgttgccgacaggattcgcaagcccgagacactcgccgaatgtatcgcggcgcaatgcttgaccgatggcggggaatggcaactttgccatccctagaaaccgccccctccgcccggctcgttccaagttgaagctgtcaaccaccgaggtagtctggagggaatcaaggctgggaggttcagacagcttattttgcatgccgttttgagacgctagagcctcgcctggtggtctagcagcccagatcaccctgggattaacagaaattctcatatgtgccacgaatatttcattgatcgtcatgatggcatgagacgccactacggagcgtcataatcctgatcccatgggtactgaagaacgtgtagaatgaccgagggccggcccgtggagtaccaaggtagtcccccttggtaagctcccatcaatgacatcatgatgtccgttgacctttacacgcgaagccaaggtacgagaaccgcgatattgttataatactgtactgtatcatagcgtctacttcctgccttcccaaggttccgaatatgacgaagtctttgacatcatgatagcatctccattgaatcatctttaccttcggctattaattacagtctataaattgtcttgtaagtgattacaggtaaatatttaaacagcaattaagtacctaggcactacatcaaattttcactttcatgttacccatcatacctccacgacttcgggaatatacagcatttagtcagcaacttgtaatctcaccatgtcgaaactctttggaccactcaacattgtgcacaaagatttaaagcaccgcatcgtcatggcaccccttacccggttccgtgcgagtgacgaccatattcaactccccatgacagttgaatactactctcagcgtgcttccgtcccgggaaccttgattatcacagaagccacaatcatctcaccaagccacggcggtgtccccaatgccccgggcatctggaacgacgctcaaattgaagcctggaagaaagtagtggatgccgtgcacgcgagagggtgcttcatcaactgccagctctgggcacccggtcgggcggctgataaagccacactcttgaaagaagctgggcatgggcttctgtcggccagtccagtctctttgacagattgtgcctgtcagccccaagccatgtcggaaagtcagatccaggacgccgtccaggattatgcgcaagcggcgcggaatgcgatgaaagcggggtttgatggggttgagatccacggggctaatggctatttgctagaccagtttttgcagaatacctctaaccagagggaggatgcttatggtggaagcgtggagaatcgcgcacggtttcccttagctgttgccgagggggtcgttcgggcgattgggccagataaaattgggtaccgtattagcccttggagctcgttccagggcatgcggatgggccatccaattcctcagttttcttatctggttgagaacctgaagactctgaagttggggtatctccatgtcattgaatcgagggtgcacaacaatgttgatgtcgaaaagacggagggaatcgagtttgcgttggatatctggggaaagacttctcctgtgttggttgctggcggatttacgccgaagtctgcgaagtatgcagtcgatcaagagtatccgaacaacgacatcggtgttgtctttggaagatcttttctcgcgaacccggatttgccatttcggattgagcatgatcttgacctcactaaatacgatcgatcgtcgttttatgccccaaagcaggctgaagggtacaccgattacccgttcagcaaagagtttttggtttctgtgtcaggataggcatgctattcaaggaatgaccgacgatgagactgggatagccgttcaatttgtgcagaatagaaaaagagggttcgactgtatatccttcaaatcagcgctatccaacccctagcagaccaatcagccacaatatcaagctcctcagtcaccaacacaatatgtcagaaatatggtgaatttgcatgcggatttctgggtattcacccagagtatcttacgacatcaatatcaggtacctctcataaaagtgtgtcggaacgtggtcgttacagtacgaactagtacgggcatagccaattgagtacttgagaatgtgattttgaaaataaggctataagagaatgccctgaaacggaggaacgtagtgaaagggtttacaaccgtgggcctgccctgaaacgaacgaagtgatgagaggagggggaaactaggcctcgccaaacgcgggttcggggcgggtttttggaaaatctgttggtttattaagtgatgcttcaatgctcatattattgaggggagttgattgtgtgttatgttgcatgtattgtgtaagatacaagtagactgagaagtcaagtatatgagtatgcatgtgatcccaacctcattattatccatgcaaccagggtatctcaacaaaatcttcttgcgtacccaaattacccgtttgtacccatggaaatgtgagagtcgggaagcacaccgcgttcctattggacgactaactccttatatacagctgactacgtcgggcgctaaacccaaaaggggagagggagaatcctaacacccctcgaaccgacacaggaagcaaaaggacagaagcaaaacatcccaaaccagaacacagccaattcgatatgtccattcagaagaccccaatctggcccccgaatctcttgaacgattcctcagccagtggcttcgtgaaaccgtcagctgccatatccctcgtgccgattggagtcgggttgatgatacccctggcagcaatgtcgcggacgtaatgatatcgaatatcaacgtgcttggaacgcctagaaacgaatgacgttcgaacaagatcatgggcacccttgttgtccatgtaaaatgtaatgggctcggcgtctgccgcatataaacccatgtcggccaccaacctagtgagccactcgacctctctcgcagcgtcggagaccgccatatactcggctttgttagagctcaaagccacagaagcctggaggtgtgatcgccaagataccgggccgccagctagaagcataacgtacccactacaagaacggcgtcccggtgtaaggggaccgccccagtctgcatcggtgtacagtactggtggaggcaacattccgctgcctggtctgaagactatcccaagttgtttggagcctttcagatatcgaagaaccctccgttgtgtggatagagtcttctgtgttggtacagtgttgaagtgggccaacaatgttggaactcttgcgatttcaggtcgcgtatgggatgcaagccactgcaatgaccccgttacgctctgatattgtctcttgtcaatactcaggtcatgcaaatcgtcaatgaccagacccggttcaatcggagtggcaacaggatagcaatccggcattcctgcatcgtccaaaagcttgtcaatgaagtcaggctgcgatagcttaatgcctgcttctgtctgttcaacgcgaagcccaaggtagtgctccatttggccaaggtccttaatagggaactgttttcccatttcggagaggatccattgtatctcggtgcggttggcaccgatgattccgaaatcgtcgacatgtgcagtgacatatagattcggtttcgtcttgtgaagaaatagccctgcatcgtaagggctgattcggaagccaattgcttccagtttctcccggagggtgtcgtaccaaatccgggctgcgggtataaggccatagagggcctgtttgagcttgcagacaagagtgcctctctcgccctgctcgaatccatacggttggcgcatgtaaactgaatttggtagcttcccattcaggaaagctgtgatagcatcagcttgagctatatgccatccataatgtgcggcggcagcgaataacaccaattttgttgatgccatgacaaaaggtgctgctgtttcgccccatagggattgatgtccgttggaaatatttccacggatcacccaccgcgctttatatcgcgtggtgccgtcgactgcctgcttcttcgcgaatccccacttgccagggataggacgtagcccaattgggacgtccccagtgcgattcaattcccacgtgttccgtttgtgcaggtcgtcaacttccttgcgacatgctgcgtcccaaaggacccgatcgacgctttccatagcttccttgaagcttcttggcacatccgctgccgactgagatgttttggtcatggctgcgaagactttgacttctttcgcaggtcgtacccaattatcatcggtgattgggtccgtaagctcctcggagctcgttgaatcaggcgtttgtttagtcacttgctcccccccttggaacggggtttgtctggctgcgcctgtcggccgaatgtctccagtgttgaagaggcggccagtctctggatcccacacggtgtagatcgaggcaccattgtatccgacaacgcgtcctattttccctcgaggttctagctttccggtcggttcgctcgtgccatggaggtggtaaaaaatgctcgaaccgaaaggaagcaggtaactcaaatcagcagggattttagagatcgcttcgatcgggatcctggtgtcctgtggctggatgctctcatcgatcgtcgttccaccaggtgtggggttattttagagaggagtgctcgtcggggatatattggcaaggaaaactgcagcgactagcgcgtgaaaccagaaggtcattgggagacctgatgctatccacatcgcgcgcgccttctctaataccactcgattggcccgttctgcggtaccattctgccacgcagaataagggttcgatggctcccactggcatccccactctgtcatcattgattgtaattctccggatccgaattcgttgtcagatcgcagaaaagcaggtgttttgaatccgagattgttgatgtgctgacgccaataccgcagacgtgcagcaatttcgcgtcggtctcgagagatcagactgtaaatccatcggaatcgcgtcgcatcgtccgtgatcaggagaaaatatttatagccatgccgggactgcagatttgccgcttgagaagcgtcatcatcatcagagaaaacgtccccgccacccacgatgtcaacgtggatgcgcatcaatggccgtgtggctctcgaggcctgccgacgactgtatcgtcgggttatgttcgcttggaggcatacctggcaaggcggttgggccttgtcgcctgtgattttcactccactgcctggacggttggcaaggtagagtacatctcggtaattgagatgtgcaagcgtgacatgccattcccaaagagtcgtagggaaagcagatttgatatcgatcgaggcttttgaaacatgctcatctccactagatggcttagccttaatgttgctctttgcattagagctgaaataagcgactagctgctgttcgccagctatcggaatgggttcatcagaggtcaatcgtgaattagcaggagttgctattataacgaaggcctgactagagacctcaaatggttcatcagcggtgaatgtgtaaacatcgcttgagtttcgaacggcaaagaatcgctggttcgatggatcctccaagacgtagtggaatggaggtgttgatctcttgtgaaataaatccctgatcatgcagaagcgcctctgacacaaggttggaatccgctccaggatatggcggacgtctttcagagtgacagttaggtcatttagcttcatattgactgttcctgttgagtatcgcggtggtcaaagcttatggcgggactagcgatggacatttaaatagatgggattcccacttttgatagtaaccttaacaagaacattacaactacctatctcaacagggtggacctgattcactgggtggagattcttcggcaacaagatacgatgcttagatatggattgactcgaggcttctcttgtgttaacttccaataaatgtgctgaattgacgtcatgaatttcattatttagacatgtgctttttattacttatgattcaaaagaaacaaattctaagctactatagttcaaaattcatcaaaagtagctgtcgggacataatatcccgttcttggtgtacgcgttcttgcgcggagctgcggctccggtgttgtgaccgccgagtgtccgtgcatgggattaaggggtagttatcttggaacctgacctgacttggaaacatacatacaacacatctatcttacatgaatcaattgacctttgctttggaagcataaccactgtccacttaactgtgtacacagtacctagctggtgataccaacagttactttaggcatcgccttaagcagtttggccgccactgaagggcaataaaatgcaactgatatcggaccgatccagccaaatattatttgtaggacccacgtataggatacctcgttttcctctgacatcagacaaaaagcaatactaaatgtagtattagaaggagatagaccaatcagatgaagagaggcatccgaaagcgattagtcttataggtacaatccataagaaaacccgattgtacttgcgggcgtactcaatcgatatcggatgggcaaagatcagttaagtcaaattaccgctttcgtcctgtttgctatcataaaaccaatgccggcttttaattggttctcaaggtattgtgccgacatcatatcccctacaatttcacgttcaaattgtttgtttaggttgtataggccccgagataagaaggtcgggatacccatttcggatgagatgaagagtgttccgggtgggggtaccgacgtcaagataagctttaacctttgctttgtgctcaattttttaatcgtttcgtctgggccctcggatggttaattagctcagcgtgatcgattgtatggttatgaacaagatgggaccgttgcacgtgccatttaccatgccatttatccgaatttgccttggccgagcgcatacaatatatccaaaaagggcaattatcgaccattggtcccttctttttgagtggttcgtagtcttccggcttatctttaaaccatctggtgtcgtatttaccaccgcgatcgcatttcatccgaaaattgcgcccggactggacgtgcgagtaacggcgacgtagccctgcgagatggcgtaatcacgtaatgcctcggcatttcctcctgggtgtcatacgattggtcaaatggggtagacattgcgtcgtagtgatgtaattattgtgcaattgtaagcgaaaattgagataaatatagggtacactcgcggggattattattattattattaattatttaacgtcgccggcaggtcacttggcaggtgacccgctacctcccgaggggtaactggacgtgctacctaagcgatgatttactacaactagctagctagctcaactaaatacacgctggaaagcagcaaatttgagcacaacgtgctgagaaaggaatcgaaggagcgccaggcactatcctggcctgggttcctgggggtggagtacccggtctgacacccggtctgactacccgcggatgggagagggtgccagcctctcccatctaggcagaggtgaagactgttgcgctatgcggcgcatgtttgtgcccgatttggacagatatccttaaagaaggacgtttcttgcacgaaacggccgaattcctcggccccagcagctgtgctcagtatccagtctatcattgcagatgggctggcctttggacctttccatcgatccttccagcgtttcctcgcaggcgggcagaagaagaagtggacgggggattttggcttaccgcaggagcaggtcgtaggggagtccctgtgatggaacctctcgtggtacacctggaagtcaccatggccagtccgcgcggctagtagccggccgagcaccccgcggggaagccggtgttcccgagcgcggctgttcttggtgtgaggttgaatatttaggtcttggtatgcctagtatacgcaatacgcgttgccgcgcgggtatgttgtttcacttcgcgcattaggtaagatagggaagggggaatatgggagccgtctaacgctgcgcccctctttgctagctcatcggcagtctcgttccctgctatcccggagtggcctggcatccagcgcacctccacgggcgtgcggggtgtgctgagaatatagggagcagacttccactggatggtgagctttttgaataatttcgtgagtttccttctgtgtggcgcaggtctcccgtccgcgagtaggctagcgacggcgaggttatcgagcaggataacgaggccggtggagtagcttgcgcagggtaggtcgacagccgcctggaggccctctactgcccccataagctcggcgtcgtacacctctgtctgggagccagctgacccatacccttgggtgatagggatagggccgtgttggaatatcccggtcgctgagataataaaaggctgggatcacgtgcatacattcacctacctcaagttgcacccccattgttccatcaaaaaaaaaattgcgtcgtcaatgcgaccgtacgctctagacctgtcgacctcccacttccagctttgctcccaggatcatttcattaatttgccccacaatgacccttcgtgcttgaacctctggtaggacgatggcgagtttgcgaatctactcgagaggtctgcaatattgtcctgtaacaaaacaaatcgagagatttcatgttcagtgcagcaacgagatggatcagttgatacttcctcttttcaacgagtgcacaaatgaaaaggccgttccgagcgtatactgtcaattctttttcgccatcgttgaatgaggttgattaaccaccacacgctcccaggagcctactagaataccatgtatgagcctcacaggcaattttctcagccaaccatgtactttgagctagagggggaactcagaactcccaagagcacccgcgcctacccgtctcataatcctgtctgaagtgataccagatatatattgactcacccctagtataagaattccaacatccttctgccgtctgtactaaagcagagtaaagctctgccttgagcatctcaccatgagttcgatcttcgcaccccttggcttccttggtccacactaactgatcgtacttagagagagtcagtcctacctttgcgacctcgaaccagtcggtatcataactttcaccacccgggtcacagagcgaagcatctccacccatcgggaagctccctagggcaccgaatatacatccggcgcttccaacttgacagggctgtaccatcttttgttgtccgtcatacatactgccctggagagatctgcatcaccatgaggtcagccagagcctagcaggctcaatagtggataacgacatcatcttcagcgagaattctggcgttgggtcctagacactgacgaaaagattacttcctacctgactgacggtattatgcgcaagttggacggtaatactcttgatccttttttcttcggtgatatggcagtgcgtttgttgccgcacctatgggaaagcaccagatacagtgagtctcgaaaccggtgcaccctccaacactcagagagattctttagacccaccgccaagatgacactagtctattcctagagtcttccgaagtacccctgtagtgaaggcggttgcaccggtttcgaaacgcactgtacaacgttggagaacctcgattcgtgcgtaatactgagctttttcgcacgcaagccccccccccccctcctcttctcctcgaataacgaccggctgactgattttattcaccagcaatgatctctgaccagaagacaaacgcagggttagctgtggagagtgagatcttgccaaaaatcgttgaaagtaaagaaaacgcaatatcaagtctgacatggaaagctcgcttttggaacaacatcatcacggcaagcttccaactgtgggctgaccgtttccctactctttggctcctgagatttatactgtacggaaaatatatatcagccagcattattaaattcctacgaaggttggcagtctttgctctatgacatattcccagtctttcttgcttcttctgcaaaaacctgctggacattttcaatcggcacaagtttatcttgtatcgcaagccaccgcatctgcagatttcttctaccaaattgggacgtgtacgccccatgcagctttggattcttccaaaaaatgaaagttccatatttgcagcgtgaagatgtttccaactctctccccagtccaaatcgctgatgccaatttcatctctctttagatttacattactgtataggataaaaatgcagcaagaaaagcgaggtctcaccagaatttcgagaccatctttcacagcaattcgaccgtcataatttcaggagtgtcctactcaactacagtcgaacgagagaaccctgcatgatattgtcaggcattggctctaagcgcaagcgtatactatgagttcgaagaccaagaagacgcatatctgtctatgtgcttgaaaaatcacattgctttggctagagaacggtcgcgaattcccagtatatggcatcggctatggcatctctcgatcccggaagcttacttgcgaccgaggtgaccatcattgccatgccaatgaggttctttgcaaagaccgggacgcgtttgattgagcaatgaacgcccttactcaatgcgaaatgtggtaatccaccgatagtcgaaatcagaatcgcctcaagtactttcctacttcactacaattcgatatcattttcgcgcttcgtcatggctgctttggcgcgtaagggatacacggcatcggtatctctctctgtaaggtaattaaaagtcgaaatcggctaacacagccaccgttttaatacaggcaagccacagtggactttattttttgatacataaaacaaagtcagttccgtaacataactgcatcatacaacggtattttgcctaggcccttgtcatttggtatgaactactcagatatatgcgaaatgaccattttctaaaagattgatggttcaagcctacgcaggcttagacgcgttttttttttttttttttttttttttcttaattgggctgtaatgattcttggccttaaaatgaaaaggcaacctgatgtgaatacaatttcattgacgtggtttcatatggaaggtatccaacaataatctccaaggtttttcatgcggactaacagggacaaagttgattgttgaagcctggatttggtgtttcctcaaatacttgagatcaatgacgatatttgctaacagtctgtcgatcagacagaatgacacaggtgctcctagttacattttcgattccacggctcgtttaaatcttatcattctctttgtagctaacatggacccgagtcattcgcaagagcacggcaatccgcgcggaacagtcagtatacgcccaagtgattactcatcaattctatgaagtactagcgaacgaatctacagcagagcagtgaagctaaggtctacctgaaggctgtctttgcaaatggagatattggctcatactctcatcccatggatgatgtccagacaaatgataagcgataaactcatgataggctcggtatgaggcaaagtgctagtctgtcaaggccaaaatcagtatggaggataatttttggatgttattgggacatctgcccttcgttcgaccgttcatcacttccccactcacgtccttatttattctaaaccgactgttcttaaccgactgtgcttgaccgtttgtgcttgaccgtttgtgcttgaccgtttgtgcttgaccgtttgtgcttgaccatttgtgcttgaccgtttgtgcttgaccgtttgtgcttgaccgtttgtgcttgaccgtttgttcttgattgtttgttctttatttttattcaccaacaattgctggctgtttaacaactatctgccgtcaaccgttcaatttttaggtttagttataaaggtgttatttgagaacatctatgtcagaaaatttgcttgaccgcaacctggccgagtcagtggtaaccgcagccccacaaagcaattcgcgataataaagttcgtgttaagcagctgtagcagtgcaacaaacaaacaaacaaacaattcattaacgcccggcggctgaaccgaaagggcaactatcgctgatctactgtacatgtccatctgtacatgctgtgtctcctgaaagcccatacacaaaaccttatcacatatgacattttcaaaaagccgtgtcgcagcgagtttctcgtgagttagtaagtgggtgagtagactggcttgaaggcgcttcttcaagtgttcaacatcctatcttcggcagttgaagcgcgtctaccgtttgtcacatggttttagggctagtaggtgggggggtattctaaccgcattcgttggctaggttaagtggcctcaagtcggccgtagcaatcgcaaatcgtattgaggctcgcactgcttccaaattcggtttccacttttgatcatcggagggtggcttccctcctaagaagaaggacgtattacttcggtgagtgtgggtgcattgcagcatttccttccggtgggcggtctacttccaacatcgaaatagaaatagaaattggtctacggtctctctcgcttgtccacatgtatattgacctgtctcgacggcattgattcgaaagagatatccattgagtcttgccaccgttgttaggctgcccctgtggcgtacgactgcgaaacctctataacgcctcggcgaagtccaatacggccttaaccgtcttcgccctcgagacggtgtctagattacctctcttaccttcggttgagccttctaatagactcgacacgctatttaacgcgtccctaaccctactccttaatattatctgtaaatctcgtagttttagatattctaataatatatagccgaccgtttcctacgcgccgtacttatagcgattgtcgtctcggaagctaaatttcttagcatatgtgaataactagttgtagcctatacgtagctaagtgagtaattatactcggttcctaggtaggttcccgtatagttttctagtatacctcgctggtagcacgctatctaccttctgtagatacgctcctttggtacttaagttctactcctactcctactaggcgtaaatcttactacggagaaagacgttctctcttattagtagcggccggaaaggataggttttacccggttatacagcttctttagcgagttgatccgcggcctcgttcccgacgattttatagtatcctagtatctattagagacggaggaaaatatactctgcttaaacctcggtagctacttagaggattatatagataattcgttaccctaatctatttcttacgttctagattacttataaagcggatctactattgtagaggattattactattatatatatatggtctccgacgcttacctattagtaagctaacttaaataccgtactgactatatagaagatacctataagttccgctatataaaccgactactgttctatcgaccctacttatacctattaggattctattaccttattattatcgtttagggcgacgatagcggctcctagatgacccttatgcccggaggtgtctgagtagacgattatatctgatgtatcctttacggacgctgccctatctctcgctatctctcgatctagtttaagcttaatctctataaaggcgtccttttactatagtagtagtgggcgtagattaattgtctctaattcgttaagccggtcgatatctatagtttttatcgcttccgctagaggaaagcgcgcgtacgaccctatattatttctacgattctaagtatgtgataatatactcctaatagggtagttacgcggtagagtatatagtcttgcgatagtatattacgcgcgatagcggagacgaagttacgtagggagtatataagcttctacctctaaggtcgcggttactaccgtcctaaacgccgataagattctaattagtacgtttctttaaactatatttaagtatcggatataaactttatctctaagcgggttatattagaccgtcgatatatagtctactataggtataatatatacctagtagagctatcatatctgcttagggtgtaagtatcgtagtctacttaaggcgattgctgttttagtagcgcgcttaataatctactagatatactccttctagtgaagtcgctagtcgaatactacccctagtaatttagctataggtaatagcttaacttcggtcctatcgaagatgattcgtccgtctctatactctctcttctttctaataaggtagataagctcggttttctctactataaagtaggatctagttctctatacctacttttcgatacgagggatatcctcggattatatcttagtcaaattttctagaactaagccctctattctctaatagaagtagtcgttaataaatactaatatacctctctaggagtcgataggctagtcgactaggtcggtattaaagaatataaataagataggggaaagtagtgatccttaagctagcctagcgtttactagcggagtagtcttagtacagaagtcgttaaacctaatattagtgtactggtagcttataaagcttaatatctattttctagctataagcgggatccgtcttacctatagcgacgtatttaggcttatcctattaactctattaaaggtatcttttaggtcgaaggcgattagggttactaccttatacttatactaggctttatcgatcgtactagatagtactagtagggcttacttagtagtcctacccggccgcccgccgaactagctattaggtagtaggctatacccttccgctatataggataactatcgggctattactacctctaggagcttactaagtatatttaaaagtgagattaggcggtaagtactaggggctaagtaatccggcttacctagtttccgtaagataatgattttcgcgctcctctactatcttaggtagtatcctagctctatatatactataaagatacttataataatagcctttagatgcttctaaagcttcttctagactagtatcggtaagttatcttccccgggtatagtattctctttagctacttttagtaatcgctcgatctctaatttagtaattgggtactactaaagttccgtctccgttatagtgggtaggctgatttctggtatatttatggcagggaagaacgtatctataaatgccctcgctttatctttattttaggtataatcctctgagcctatttgtagtgctgggatataaccctatatctctcagggctttatatatatcgcggccttctagagcttccctttactagctttatctaggaactacttctagtacaaggacttggctttctcgatggtccttgtccacacttgtcgtttctactgcatagcttcgaaggtagccgtggtataagcgtgctctcttcctaactcggcgcagtttgcctgctacctcctacgtagttggttgactttgacttattagatcttaagatctggcgtgaactatcgcttagagtatagcgtggggcatatatcgggtataaaccggttgactacctaggctatcgccgctataagggtttctactacccggtcgagtattagccgggtcttaatctatttctataggtttatctgtcagactacttcttcaccaattctcgcctagtccgcgcgctcgtatactttcttaggttttatacttagtttactctagggttataggctctattccgagtaggtagtacggtagtctgatctatagttcttataatataaatggtatttaacgagtaatcctaggttatttattactatctagtcgatagttaagttctatcctagattatttagagcctagtaagttgccgttccccgagggaggtaactagagagattataagtttagaagaaggtgattagatcgctagtatctttaataaatctaggtaggatataattaccgccctatatcggataatatcggttaaagtcgcctataataataatacttatagagcgttacttattctatacagcagctgtaatagtatttactattacggtaagcgccgggattactaatacgttatcggctataaagagcggtactagagatatatagacagaaaagaaaagagtttaagaatcggccgtctagatcttaatagctacaatatctaggtggttgtaaggaatttgacggtataaggaggtagagattcgtctattcacgtagataagactacgaaaccgaactacgttagtctgcgtggtaggacgataaagtcgctaggcgctatagttgatatatatatagtaggttataatcgatagctcttagattagaaggatatctaggtcttagctttagtagtcgttaataagtacttctattcttagtcctgattttataatatttaactgaaggatacataggttgctctctaatatcagttagggtaagaagtcgcgggggttagatatcgtcgatctccggtagcgtacttacccctatagtcgaggtagcgggccctaattcctagtaggcagcgctactgctcgtattaacctatatagtatccgtactgcggggtctccttacataaccatactaggtatctaaactattaataccggaaatatctctttttcttaatctcgtatcgctctacctaagggatatagtattaactaataacgaaaccactacggagtatatatttagctccttctatagagtcaaactagattcctagcgatacgaatttccctagggccttatctttcgattttatctaggctagttcttcgatatagaaactgtattctactaggtcgttcttatagataattttttccgctatctaggtagtacctttttctagattgaattccttagtaagggtacggtatactataataccgaaacggggtttgactagcttcgtattattacccaatttatatagctactaagtattattactagctacctaagctaactctacgttcttaaatcgaatgagatagccggttttagtagtaccaattcctactacttaggcgtcttatattatagcgtcgctctatagtatagaacggatatggttattaacagtattagtagggagatatcgcctaaacgcgtttctattgttattatcgttatctcttaggtctatagaggctctctaggtactaattcggacatagttttactctttctcaggtttctaatagtttagcgagggtatagtattatcgctagtagctacgactgctgcctaagtcctagtcgcggtaactgtaggggcgctttcaacctatactcgtaacgctttcactttcttataaagcttctcgttcttttcttataggatatattaattatatttaatctcctatagctcgttctaagtggattcgataaccgcggtttgatagcggataatatcttttagggtcccgataagtttctatacctctttggtagtaactcgacccgagttctccgatagtataaatatatcgccgctctgcgttcgcttatagctttcggtaggcgatccaggggatccgatatttactctaggctagaaatcttctaccgagaagctagtaggagtttcttaggtatttataggagggggttcgggccctcccgtaggtaggtctatcgtcggtccagggttagttcccactcggcacacaaccatagctgaatatatatatcgaaggtagtatcaaccactctaaaagatctcgaacctttttctcttggtacagtagaaaccgaaaacctgaagggtatctgttttgggcagatacagacgcgctcgaaatcagtttcaccatttgactctgtttgattctttcctgaactcaatcctgaaacacgctagtctctgttttaatttaaccaatttcaaaatcctgaatcgtactgtaacccaaaatcacatgatcagctacgttataattaggcctcgccaaacgcgggttcggggcgggttttcatttttccaacccgcccacgggtaacctatcgcgggttttgtatttcacaaacccgcccgtgggtttttggaaaatcttcgtgggtacccaaattacccgtttatacctatcaaaatatataactgatacataggtaacccatcgcgggttttatattttataaacccgcctatgggtttttagaaaatcttcgtaggtacccaaattacccgtttatacctatcaaaatatataactgatatataatatataattagtcagtctatatatttttggtaatttattttggtaccgatttaatataagaaatataatctaataagataaaatatctacccctaaatatatatattaataatagataatagctatactatattttaggccgattgtctactaccctatattttcggatactataaccggataccttaaatttaagtaggtcctagttatataagtatcttctatattagaattgttacccaatcgagataagaaagctagttagataataataaatatatacttaaggtcgtttatagtcgcgcgggttttagatacctataggttaatacaacctataaaatacgttagaaaaaaaaataataaaagagtcttaatctaaggtaatagtatctctaactatataatactacgttagatttaaaggctaagcctcggttacgttgagatttttagaaaaatatcgtcgctattaactaatcgatctttaagtcccttacccttaattaaaccgtcctccgattccttcttagactctgatttccaatcctcagtataaatattaagattatatatacttaaatcttacccccctattcccgacgcgagcgaatatactaagtagctatatagccttttagggaaccccgatagagtagtatatttaattaataacccctgctgattctaaaacgcattagaccgaaccgtagaaagaactagatcctatataaattagagaactcgattgactttctaatatagtaggctaaaacggaatacaggtaagtactaaataacgaaggccgatctagaattaagtagtggatagatttatattataccgaagtttagggatacttcgactaagttatagatatcttaactagccgacctaaggtaatctataggtcttatttaactttattagatcacctataatataagaaatataggataagcgctataggaaaatattagagatctaaggcttatcgatagggctagaaaagatcctaccgttagatacttataataaactctatctagaaggccttcttaggagctttatctaattataagaaatttactaccttatagctcgaagaaaggttactaaagataatagcctatttacgattgcctttttagactattaagaatcccgagttcctagtactacttaatttaatttactccggcctaggagaattagaaatctctttagtaaagactctataacgttacttatataactctattatagtctaataggagtcttagttacgtgacttacccgaagatataaaagtttcccttatactagattgttagattagccctttttaataagcgtttatagcgattatagtatactttatcgataaagattagaactatcgtaaaatacttcttaggtttaagcctctatacagagcttatagtagcattaatctaaacgaagtacttctttaattacttaaggatagataacttctagatcgtatctttagtataactatagataatataataaataacgagactcttatctaagccttataggagttacttttattaggcggcgctattagtacgagagaatctattatacgtatactatatatagcttatataatttagctttacctaaagtaactgctaggttatattaaagccactctaaagaataaagaagtaagaaggttttagtctaatacttaagctatctatctaagagattctttagagtatagtaatatagcgtatactctcgtaaaggtatatttaacctagaaaaaaaagactataggaacttttattaatatttttcttttaatagattcggttatttactgtctttataaatataagcttataataaagagacacctttttatatctttaatcgggtaggactcggcttttcctcttctataatatatagacccactagaactctacttttttaatactttaaagagcgcgctggcttaggaatactattaataaatactaccgagactataaatatagctaatttaaagttatagatactaagtagtagtaaattgactatatagttaatctaataaggccgttctttaaatttactatagctctaataaagactaaagatataactatctatagtatctttcttatatataagaagcttctagaatatatcgaacgcttaaaccggaagctaagaaagaaaataataccctagaaaaaagatatatacggtactatacttatagtaaagtaaaagttaaaagattattacgagaagacttattataactatagatttctctatagtatagtggctttacttactccttagtataagctttattatatagtattaataaagaaacctagagatactattctatactatatagcgccctttattataagccttagagttagaacggcttcttaaactattatatatagtagaaataagcgaaggagtcaggtataacgaggttaatcgttatctctacaagtataagtatacctagcttacttaatctaaaagaccgctaataatcttagcgactaccttaatactaccgcgtatatattaaagagagaataagagtaaattccctatactttcgcgactagctcgtgatttactctcagttctagctactagtataggagttaaaaggctatttaatagtacctaggatatttactattatcgccaaggatctctaaataaaactataatataagacttgataatatatatatactctaagaaatttaccctagagagctagtaatcgaatctattagattataggacggcggaaggggaggattaggaaaatctcgaagaatataaggtaaataaggagaataaagacgaagatatagctattagtaatatagacgagagcgaattagccgaagatacctatataagtcctactacttagagtactctaggatttgaaagtattaccttataggaacttctgtctcttaatcgaccgtaagatacaacgataaccgctattcgtctagacctagagagcgacgataaagatctattactacctctagttatatatctagaagagagatcttaaaaaagattattaggaaggataatagtacctttaagccggcttaaaggctataagctatattagtttatctgctatagagctataatttgatataatctccttataaaaacacttatcctaaactataaacttttaaaactaggctatgattctactatagttaaggcttttctgaaaagcggtagtagcatatagtctactcataccggggcaatatattgatctaaacaaataattttacataattttgtgctagctaacaaatccttctcttttgggagtcataggtaatttgggtacccgtatgggtcgcgggtcgggttttcaaaaaacaaacccgcccacgggtctgctgactaagacccgccccgacccgtggggcgggttttcgtgggcgggttcgggttttggggcgggtttggcgaggtctagtaattacataaagacaaacagtacgagcagtataacaaatgtaatgtggatccagaggttattagctccagcagatcaggtgcggcgcaggattgccattcccatttcattaggtagcggtatcgagatgtagtttcagccttcaaagcccagttgctagtattgataccttatcaatgagaccctttaaaaaaattattgcaagctttatttatgttaggatggtagtaaacaagaacgacattagcttaaaaaatttctttgaaaaagcgttgcgacggccatgggcggtcaggccttctttcatcggtcaaagtggatcgacttatcacttcaccatctacaactgcgaatgataatcaagttcattggcatctacggcatcaaaattggcgaaaagaaagcctgtcatgacgcttcatgaaattcaagcagaattgggattccaagtcgagctacccaacgatgagagttaaaagaaacggttatatgcggatctctcacctgtcccaacaaatgttacggaaagggtcgagaaaaagctacaagaacaccaaagacagagcctcttaaaatgccatattggccctgaaagtctgctttcagggttaggcgaggttcatgtatgtatgtttctttcgcccactctatttctaactcaacccggcttttggctaactagagtatagtcacttaataccgaggaagctatcattgcaatgcagcgttctagtgctacaggatattatgttttcttattggacgttcggttctcatttggattggaactatgtctccctttgacgggtctcgaggacattcgcgttatgataaatgcaaaggtatataggacttatcctgaattgaagaatttaacagctcaaggaaatacagcatcaaagaaaccccatcaatatgacttgcggcaactggggggcacaacttccgcacgaactacgattatatatttttcaactcgccattgaagaccaggagtgagaacaaacagatccacctcatctcctggaaaggctttttgcagactttattggaaatccaagtggatttggctttccgtcaagtcagaatactagcgctctgtgcgtcaacaagtggatgcgtcaggaggcactaccctttgcataccggtcattccgtttcagattcgacggtatggatggtttcatcagatttgcactttctatcggtcgaatagggcgcgaaaatgtggaatcgttggatttgtcttggctcagctatagcgagatggaagccacgtcgaaaccctaccgatttctatatgcatttgccgtctcttcacgcttgaagatgcgtatatctattgaagcagctgaaaagactcagaatcttatgtttttatttcaatgaagacattctttccatgaccccgtgcgatgaatttaaaatcgaccctggcatccgagagccttcttccatctcgggtctgagatctgtcgagatcaagggattgggcgatcagcctctagagtccacctctgtctctgccaagtggttgaaaccacggttggaggatcaaactcgagctaccagctaagatagactgctgaatcaatatatctgtcacaacgaaaaaaaacgcctgttatttaccactcggccaaaaaggtgcacactttcttagctaaggtaagtatggtgtattttatgcgtattcttgacttgacaatatcctgatgcctcaggcatcattcaatagtcgtcacatgatttagcatcatttcgagccacatgcggaaattgcgagtttccctatctcctgtttcgctgcagcatgtctcaacgcctaaattcagtcgataatggggtcccctttgatggtaccccgaccgcggattccaatatcaaccttgatgcctcgatcaattagtggaataacgtccctcccacctctagtgctatgctagctatgctaggcaagttcccgtggtacacacgaatcgagctgcgaggatccaaaaacttcttatccaaaatccgacgatcctttaccccccttcccgataagcgaaaatttggcctgggtgtctattgcggcgcaggcgtcggtcgcgtgacgaaaggcttcctcggcgatgtctgtgaaatggtggatatcgtcgagcccgtagaaagttcacacagggtctcaaggaaggagagttgggacagcggggtgtgattggagacgtataaaacgtcggtcttcaggattggaatccgcataagaaatacgatttgatttggacccagtggtgtgtgggacatcttacagatgcacagctggtcgcctacgtcccaatatgtcgtgaatttttgactggctctggaataatggttgtgaaggaaaccatctccactgatccactcggaaatgacatgtatgacgaggtagacagcagtcacaaggatggattcgaagttcaaaattatcttcattgccgctggtatgaaaggggtcaagtctgagatgcaaagtgagtttccgaagcaatatgaactcttgccggtccaaatgtatgccttgcggccgaagaaatgaactggatctcgagaatctacgtcacggcttcaggccgcgactcttaagcactctacttagaaacggacatttctttcgcaatgattaaaacatcccgcggtggtcgcatcggagacataatgcccttcggatcaacaaatctgcaaacaatgcctctggcccacgccgaaacagctggtctcgtctcaagcagcatgtcgcgcagtttgttccagatgctttcgcggctccattccacattaacaactgcgctccacgatcaaactgctggcgaaatgaccagacaaagaaagtacccttggccgtcgagcgtcatcgaacattaaggtcccgacctttgttcctcgatcgggctgctctgtaaagggaccatcaggaagagacgaatgcctctcgacaccgatatcacgaaacgagtgcactcatcgtgttcaaaggcagatgacggtctttatatgtttggaaattgacaatgaatttgctggcctttgtggggtaattgagacacgagtggggttgtcatgttggctttattaaatcatccaaccataatgggtggctttgacacgcatgggaatatgtggtaattctttgcttgtgattctcaaaattccaacaatgtttcgacgatcgtcgtagttgcgattcagacaattccacgtgggaaaccttacaaaagctcacgatgatgttcttgattctacactgtagtattgctgtaaatgcttcggcgttcaagcgtttcttacaaggatggtgcattcccaggacgaaagaaccaagatgagccggcctttacgatgattgggtatcctataaataactactgcatgctgaagcggtctgtcattaccactacgacgtatgcctggtgagtatgcagatccaccgtaactttaccataagtgatgattttgtgccctggaaagacaaaagaaatgcaagtgacatcaagatcaaagccgaggctgtcaaatgatcgctcgataaatagagtagaacgtgacagcattcaccggtggctatgacgtggtcgaatcggacttcagtatgaaaaccacttgttgtatgccaagggacgcgtcaactattcggcatacaaatccattcgatgctctgagccacccacgcgcaatgctgtaagctagacgtgaacgaaagccaatggtttgcgaggcgtggttaaaccagattaggtacctgtgtggctacccaatctagacagataagcaagtttgattgggagtgacaggatgagcttctcaccgtcactttgtgtttccttcgcctaaagattgcccctggactcgcgaaggactgacaggggagggtgtctctcgcctgacatgagccctatattcctgatgtcggatcataaagttgcacttctcgcctccccatttagccctcatttgagaaaaacttggccatggactcatggtcactgggtggctctgagcctggagcctatgtgagtcatcttcagaatacatctattgacctccctcccgagccgggagatgcgcccgcgagatatccgccgacccgtgaaatttctgcgatatccgaggcctccagctcatacatcactggtgaagatcaacagctagaaccatctaccgcagagtctgcatatctcgagacatccggaatttcgtcttctgctcttgaggaagttatcgttgcaaatgagtctctatagagtactatttgcgacgagttcttgatcggcgaaggcgggatgaatggtggtgactctagcacgaatctggctagtaattctggcgcagtgaacaataccaacaatgatgagcccgcgactcatgatgcggagacgaagggcggctgggaatctgaagaagcagagatgccttcagaggaagtcatcgctccttcgccacatgatggtctgtactactgccaatatgtgatatgtcaacaacggaagggctatgccctcaaatgtcaactgacgtaggtttcacgtctgatttcagttttcagcatcgcccagctgctaatgaatctcaggaaacacattcggacgcatgttctacctgtcaaatgttccgaatgcccatacgcagcagctgaaaagaaagacgttgatcgacatgttaaagctgctcacagaagactggctgagcaaacttgggggcccatggagccaattctatgcgccttgtgcaagaaggaattcacacggagagacaacgcccagaaacactacaaaacaaaacatgttcgataaatgaagcaggaaggatttattgacaggatccagagtaatgtattcatttttgtttttgcacaatggcatgctttatttcgagtccctgctttaggaagactcgcagttaccaactttgatctatcccatgggggaggaggattcgggttggaatccattggggttttgccgttacgtatgggtgaaaagaagtgtccacccccgaacccattgtatctgacatgccgggtgtatttagcatttgatgtcagacgatattttgacattcaaaaaaccgtgcttccagtggtaagttctgtatagcttcgatttaaagtcaatttgacaagtattggtagagttttgtgcggtttaaagtcgcgaattgcttcggcttgggcccaggtagatatgcgaccgctggcaaccacccacaacatcaacattggtgttgagaaattgaccagtcaaacttcaaattgaggatacggactgatgtgagactcacgggaaattggaagtcctagctattgctcaattcaattttggaaaatttagaccgttttacacacccggattgatatgttttatggcatctgtcacacacattaatgcccatatgtacagaaaacatggaacaaaactttcaccaagcccgcagagcacgcccattcttattcgcaaaagttgtcagattggcgtcagccccagtgaaatcagccgacatgcatgaagcataccttaaagctccaataggcgatagcagacaatacaacataccatttgacggagggacggagtgcaacagtgtgaaagttgggaagtctcagaaaggttggttaaaatcacccctggattatcttccacaacgatgacatttaatgttatagggatacgggtctagtgacgtaggtgtaaatgcaaatgtacgcaagggccagtaaccaactgcacatgagccaattggtaagggaaggcaatttggacaaatggatagtcttgttgagctgctaatagctggaaaagcagtttcaaagtgagcgtgatagtgatatgcagaggcacagaaatggggaccatgtggtccatcgaagagactgtgcgtgcagccagagtcatcattccgaaaatagcacggactgagtgtcatgacttggtccaccactacgtataagccttccgagcagcatttgatagcctggggcaaattatcttttcaagcactcggggtgctttgctgacagcacagccttgtttttattcaacagaaccattcgatgcaaaccaacaaagcattcagccaacgggaaatatggccgcaactaggaggtctccgagacaatggcctcagcaccgcattcagcatcaaacatactggatgatgcttctgtataaccgcaagaatgactttcgtactgcctctctatggtgcagggttatccaaatggtgatcggcgtgagagatcgttcgccgaaaagattataatcactttttgtctagttcgtgtaaaatggattggctggcgtgccaaagatagtaggagcatatgcttggtgtacatctggggatgcacgaagaaggtatgttgtatctcaatcgtatctatgtgaattgatattagtaactgccctagtcgactccgtagcgataggtcactgtggtgattttatgatccttgaggccaggcggaaaaccaatgaatgccccaaatttggtcccaatcataccaaggctgtgcgacctggaaagcaacgtcaagttgcacctagcctttgcaaactagttgtcgtgggtcgacattatggcagctcctccagaactcgatcttagtcccaggggacttggaattggcgtgggggatccagcatctcaagccaccgtcgtaacataaaatgactcatgacaaagattctatccaggcttaatgaaagaagtgggaatgaactagtagtggtcttgtccaacaagaatgatcaatgaagagcaaacgatggtccgccaaatttgcaatccatgatccgaaacttgagcaacgttgcttccggtttctcctgcatcgtgggcctcctgcatcgtgggcctcctgcatcgtgggcctcctgcatcgtgggcctcctgcaccttgaaccaccttagttatctctgcattaagaccaatcgggatcaatctccaccagcaatttatgagttatccacccacgcgtgctgagggtgtttagaaagatggaccgatggggacctagccgacagctcatcacttaagcttatatagagctgctttacttagcggcggctggcgcgctgacaatgccccaagtgggagcgataaagtttacgataaaaagaaaaaaaaaagcaaactttgaaccgtattttttgagatacatcacctctatttaatccctatctccattgctccatgcatgggtcgtagtccatgtaattaaacgtgttgggttgaacctagagtatgaaggcaggctacgggtttacaggacctacaagattgtgattggtagctgccaatattggaggggtcgagtgaggtaaaagtcctttgtgaaactaatgagactacctgtcatgtagtggtgatttgctagctctgcgtgcgagcagattcgcaaaattggcctgctatagtcctggcaaatcgcattccgccatggcagcttaccattggtgatgggagtgtgtgggcagcggtcaaaaattcccctcatctgcttcatatgtctattcctgcgctcattcgtgtatttgttgattcttgctgcagatagcctgaaatagaatgatacaaacctctaaagcagataggtctgcatgagaactgtgtccgtgctttgtcttgagaccagggaggcacctcttgactctgaagtgcttccacaccttttgtttctatatatctctggcttcgatcttgaaaccttctattttgatcctagtgtcatccgaaccttatcttttgtcatgtctgtaaacattcgatcggagcgactggccaagtattttggagcggttattcacggaaagcaagaaatccaggattcgacccatttcaagcgatttattgaagcaacccttgatcagagtgatcctagcattgttgttcagcgaatcatctcaagccaaagcgctctgaaagccttgcaaattggactgaggtccaatctcaccccggtcttcatcaacgggtataccgcgaagttgattcaatacttgaagaatcgcgaagtcaagctactttgtaacggccaatttctcgagcagctccttctgctcatcgtggagcctcggactctctggggcgcatttttggaggctttccgcactcggaaactggaagatcatgcgatccaggctctgtgctggttgatggcagagttgctttcattgcctccgtcttgcggggtggatgttagcgccgacgctcagactgttttgaacgatggatcgcttttctcttcgccctcggttgacatacgaaactcgggccacaaaatcaaataccgcctagagatgaaaacatctgcagccacctatcagcactctgagatcactgcaggtggtcggcatgacaatgattttggcgactttcgcttgacggccatctttcctacggccgatgagatggaatgtaaggagaaaccgttttatcgccgtgcggaagacatcgcgcagatgttcagtggccaacgcattgccggctatattgacaaccaatttcgtcttttacgagaagacatgctctcagagctgcgtgatgagtttcaagttgcgagaggcacgaagaagggccgacgatcggctttccatttgaggaacctctttctcacccatattcgctgcacttctggtaccccaagccgccttcgaccatacactattggtgttaccgcccagtctggtcttggaaagctgcagaatctctcagaagatcgtcgtaaggagttcttaaagaccacgcctcagtttatcaagcatcgtgcctttggttgcttagttagagatacagaaattgtggcttttgctacaatcgacagagatatcgatgaactggtatctgaccctccaacggtaatgctgcggattacaggtgaggaaccactcaaaaagtctctgctttacctaaaactctaccatgacgtggaattcttgcttgttgacacagcaatttttgcatacgagccaattttgaggtgcttgtaggcgagaatagaactgcctctcagagaagagttgtttctctacgaaagagatcagccagtgaagaatccaagtctagttccttagggtgtagtcaacaagctgaagaagggatacggatataatattcagcgcacccttcagacctcaataccagtgatactggactcttcacagctgcactccttgttggccggattgacacagagagttagtcttattcaagggcccctaggtaagatcatacggatcctcttatttccactacctcagatacttaacagacaatatgacctccaggtaccggtaagtcattcataggggcccttctagcaaaggccgtttgtgacaacaccgaagacagaatcctggttatgtgctacacgaatcatgccttggatcagttcctagaagacttactagatattggtatagatccttccgccattgtgagactaggatctaagtcgacgcgacgcactgagccgcttggattgttcaagcaacattcgtcctataggaggaattacaccacttagaacaccatcaatgcactcgagggggatggaaatgagcaaaaagacactttgaatgattccttccaagcttataggaatctcacagctaatactacatctatcttgggctatctggagtttgaagaaccagggttctttgcggctctgaccgtaccagaggacaaaaacggcatgactatggtcaccaaaagtagaaaaccaataagaaaagactacctctatgaaaggtggattaataacaaaagcctaggagtatattctgatcttcttcccgctcattcccatgaggtctggaaactggatcagaaagtacgggaggagaaagacatgtcatagagaagagccctattgagtaagtaggcagagactttggcagtcagaatagcattgttcgacaaatgccaaagccgacttggtgctaccttaggcaagaaaaacagagaaatcttgaaattaaagtggtttattggttgcaccactacagccacggcaatttattctaaggacattcggcatacttctcctagcatcgtgcttctcgaagaagccggtgagattctcgaagcccatatgctcaccgcaatgacaccagagactaagcatttaattctaattggagatcatcaacagctccgaccaaagatcaataactatagcttaagcacagagaaaggggatggttataacctgaacgcctcactcttcgaaagacttatataagccaggtttccatatacagctctaagcaagtagtataggatgtgtcccgagatctcaagtcttatacgcaatctcacttaccctagactagaggacaatcagaagacgaataaccacccctagctacaagggctacacgacagagtgatctttttctaccatcaaaattccgaggacatttctactaaggtctcggaccaacatgataagagctcgagagggagtaagacaaatgtgtttgagacagagatagtcttcaaaatcgtgaagtacctcagatagcagggatatagaacaaataagttagtcgttttgacgccatacttaggttagctgagtctactgaagcagactctaagcaaacagaacgatccagttcttaataacctggattcttacgacctcgtcaaagcaggccttctgtcctaggcaggtacttcccactctaagcgctaaatcaggctgtctacaattggtgagtagggagaaaagggaatagttataagaaagagattaacctaagaaaatagacaatttctaaggagaagagagtgagattgttatagcttcactcactcgcagtaataagactggagatataggatttatggcagctcctgaacgcctcaatgtccttctctcacaggcccgaaatgtcctcattctagtgggaaactcagagacgttcgtctctagccgaaagggtcgaaagtactggaggccatttattaatcaaatgaagtcagagggccacctgtataatagactacccgttcaatgtgagcagcatcctcagacaaatactattcttcgaacagcggaggatttcgatagagaatgtccggatagaggatgtcctgctccttagtaaattcacaaggaattttacccttactaatatcctaatactaactctttcttaatagcggtatgaaattaagctgtggagtatatgagtgcccatcaaaatgccaccaactggcggaccattcaaatatgaagtgtatcaagattgtggaatggaaatgtcctcgaggatattgtctatctctttcatgttcttaggcaaagcgctcatgtcgtttctatatccaagaagatgaggtcaaagagcgtaagcgcaaacgcgatcttgagttagagagagaacgacaaaggaagcagaacgagtacactcaacaacttacagaagcctaggaggaagttttctatcttaggcatgtgcggcgcgctgaattcgatgatatggaacgcgcgagggtgcttgaatagtaccgataggaaattgtggggttaaagaatcaccgcctaccagtatctcttcaacgtaaattgaatcttatagcgactaggagtatatctctaaccatcacagaagcaaacacagaataaagcgtatattccgttaagaaaacaatttaaagccgtagtattgagtctacaagtcgacaggtaataccgctgtaaaataactcgtcggctaaaagcgaataggaatatgaaaaatagttctccaacgctcaaagccaggcgatcgacaatttgatagacataatcggactcgaaacagtgaaagcaaagttcttgtctatcaaatggaaagtggacgctgctatcaggcagaatattgatttgagccatgatcgatatggatcagtattgcttagaaatccaggaagcggtaagacaaccattgcccgtctctatacaaagtttctatcctccatagggatcatccccagtgacacattcatcgagatgaccgggtccagactcacgaacaacggtatttctggatgtcaaaaaaccatcgaaaccctcttaaaaagtagcggtggtgccatattcatcgataaagcgtatcaactcctcagtagcagtctcagtggttcgcaagttctagatttcctcttagctgaagttaaaaaccttattagaaaagtggtttttattcttacaggttatcaacgaccgatagagaagttcttcgcgcataatccagggcttcccagtcgtttcccgcataagctttagtttaaagacttcgatgacactgagttaaggcagatcttggtcagatacatcgagaagagatacaggaagcagataaaggtcgacaataaccttagaggactttactatcgcattatagctcgtcgagttgggagaagacatggctgtaagggcttttccaatacaagagctattaaaaataccttgaccattatcactaagcgacaagctgcacagctcagtcgagaaagacgataaggtgacagcaaggctaaggacttctttctaagcaaggaagatctgattggccctaatccatcgcaggctctgaaattatccaatacttagcagaagctgtagaatatgattaggttagacgctataaagaacacagtagaggccattttagataccatacaatacaactactagcataagctagataagaaaccactgattaagtacagtctcaataaaatctttttaggaaaccccggaacggggaaaacctcgatcgcaaagatctacagtcagatacttatagatatcggattattatctaatagcgaaggtatgctatctcccatgctctctataagttatactaacaatcacagtcattataaaaaacccctcagattttgttagcagcgttatcagagtccgaacagaataccaaagggatactcacatctacaatagggaaagttctagtcatcgacgaggcctatagactctttactagaggtatctcggatagggcaggttcccagagtaactcatacaggactgccgtaatagacaccctagtagcagaagtacaaagtacacctagcaatgataggtatatcttgctcctaggttacaaagaactcatagaagagatatttcaaagggtcaaccccagcctcagtcgacgctttccaatagaccaggcatttgtctttaatgacttcacctcaagtgaattggatgctatactaatactaaagcttaaagaacaaggatttgacataaccgatcgtagccgctacatggtattagagatacttaagcgttctcagagttgcccgcgttttagcaatacaggcgaaattgataatctactcaacactgccaagatacagtgctaaaagcgcatctcatctagcaaaggcaccggctctgctccagattctatccttaatgctcctaactttaacgaagactttgatcgcgcagatagaaaggaaagtgttataaagatatttaaaggcgtcatagggtgtgaaagtatcgttaccaaattagaaggctatcagaaaatggttcagagcctcagacgactaggcttagaccctcgcacacagttgccatttaattttattttccgcggtcctctaggtagacaaacctctatttacagtcttttctccactaaatattactgacatataatccccctttaggtactagaaagacaagcacagccagaaagataggccaagtctactatgacataggcttattagcctcgagcgaagtggtcgaaacctcagcgacagacttagtcggtcaatatgtaggtcagacaggcccgaagacccagcaggttttagaacgtggccttagcaaagtattattcatcgacgaagtctatcggctcgctaagggacattttgccaaagaggccatagataagattatcaatagtattaccaagccccggtttactcaaaggttgattatcgctctagccagctataatgccgatatcaatcgtcttatatcaataaatccggggctcaccagtcgtttcccagagtctcttcaatttgatccattgtcctcggcagactatgtcaagttagtttgcgagctcttgttaaaagaaaaaggaaaaatattagtcaaatcacaagcccagttcgacctggtctgcttaaagagtccaaatattaactttatgaaggaaatgttacagcgctttgatagactttcaaagactgcaagttgggcaaatacacgagacattggaactctcacaaagacaatctttggcaaattgctacagtcattccacggaaagaaactagtgctaagtgaagacatggtacttcaagcgttcgactcaatgatccttgagcgatctagccgagaagtctacccgcaaaagactccatcaactacaatccaaacgagcgataaaatagacctggctctacgcactcagtcgttgagcaaccttgctaccacactgaaaagtcaaggctcagtcaacaaggatgtggcttctagcaagaaactcgacactatgggtcccgaaacagacagattcactaccaccacaacgcgagatgttggtgttacggacgatgagtggtgtcaactcgaaaatgacaaacttctggccaacgctaaagagaaagagtactcatgcttgaatgacgaagaagaacaacagaagaagaagatattaaaattaaaggaagagggggaaaaagcggcacgggagctggaagatgcaagagggaaagcagacgaagatgccaaaagacgccacgagcaagaccgactgcagcatgagttagagcgcaggagacaggaaagattcatggagaaactccacaggcagcaagaggctttggctgaggcccgtcgtaaggaacaagctaatcagacgaaattgaaaacaatgggagtctgtgtcatggaatatcgatggattaaacaaaacggaggatatcggtgtgctggtggttcccattggggtcggatgcgcagcttggaggttcctgatcttgtgatattgaagcacgagaaaattatctatttttagtagtcctttggaatttcgttgaaatccgacaaaaatatgatgattaggggcatccattggaaagcaatccaaccgatagcatggctataagctttagagctttgaagcgcacgatatcggcgctgtttttccatatcgacactcggcaacgtcaacttcgaagtctgccgtcattatcgtcggcgatatatcgtcaccggtaattggacaataagagaaaggctcctgacgtaaaggaatttttcacgaagagaatgtaagctgacttactcttttgttcggatcatgcgcttccgttgtgtagtcttgcgtcgtgttgttgccgtaaaatgcgacctggtatttagatatcttctgttgctctccagtcatatcaattagctctcctattgcaaagtacatgtccaattctttctatgtcgcttccaattccctacgcacaagtgtacatatgtatctacatgtaagtatctatactaatgcatattcacatcattgttttcgttcctgccaacatgctttgatattaccaggtctattttacggctacgctttccttcttccgttatgctatatggcagaatatccaaaggtcacatgggttcgatttcattctatggttttactctagtagattcgaggtgttcgagaaaatgggacgcgtgccacgacctcttatttgttgactctaaagctcttccagaaattaaccaagtcgacatatgattcttcaactcagtttccactgaactactggatccacgtcgacagtgagctgtggatagcgagatatatgttcattgactccgcaccagtcgcccagtgtacccattccaaaatgtgtacccagtggaaacgccttattttcccctctagaagagttaaaaatacaattcatacctctgagctacaacagtccgcagtgctggtctcaaaaagggtttggcagtcgtgagggtctgagagtcttaggattcactacagttccttgggagctctctcaagactccatcatccatgatgccgtacttctcgaaggacactctcagcctcgtgactcggacaggtgggtgctattgctggctcgtcgaatctcagaagtagtaaagagtcctcaattcctgttgtgcttgaattggatgagctagaaagaaactccttttgtcgactttcaagaatcaggaactatcaaaggacttcctggacttcagggattttggcatggcaattcctccaaagtaatgttgcctttgctggcagcatataccctgtgctggtaagatgtagtcggcaagtaattgacgagagtaatgatatcgtctctccagacacgagagacttttgcttttgttcaagcccagaatctttagcaaggctatgcggggagacatttcggcggcatgtaatgaatggatttcgttccgcgtggaaatattgcgagcgatcttcgatatctcaataacccacactggcggcctctgaggttagcgtatctctaaaaaagcggcagcgaagtgataaggaaaagaatacgcaaatcaggtcgccactggttgttgcacacagcccctccttgaattcctgggaaaccacgcaagcccggtgttccgtcttgcccaatgttcccagtgcttccgatcggctcttggtcgcccggagaccccttaggccctggaggacctggaattcctctgggtccatcactaccaggcaatccctctccctttcgaggtccccgcaagcgttgtctgcaatatagacaccatccgagagcgtttgccactgcaatcgcaacaccgaccaaagcgcctattgaggcagtatggctttgttgatcaggtctttctggttgctcagaatcagggcttatagtacttggttagtaaagtgtctccttataagaaggaacagagccaagggtcattgtcgtcatgtggtgcgatccctagggatgggtagagtaacgatcttgaaaagcggtaatcttcatgctatagtttgattatccaaaacgcgatggcttctcaccaggaaggggggggggggttcgattgagaaggcttcgcctacgaaatacgctcatgatggtggccggggtggtatctgagaagccttacgtgggcagtgtatgaaaggatatgaacaataggtaggtatgggccctcccaaggctctgcttcgaccgtaagaaaagggagtaggactccagctaaattgatgttttttcatatgtaaaaaaagaacgcagaaaatcacaaacgttcgaagtggccaggcccagaaagatgagtggatatacacattcgacaaccaggtcatccaattattcaatcatggagcatttgtagaatacgtcagaaaactcttccttcaacttcgcaagcttcgctggtgcagtcagctgggactctatttcctcccatttccgcttccattcttgttgtctctcgacagaagaggttggccgttggccaaaacagtcgccttctttctgcttggctccgggcgtagagatgtccaacgattcacattcgttgtgctccacagcgaacatgctgcgagcatacttgagactccatttgggttgtttcccaagattgaccaacacgttgtagtgaatcccttcggtttcgtggtgctcgcggcatccgtaatacgtcgccatcgtaagtttgttgcgctgtagcatatagctaaagccttcttctaattcatctttcaattcaagagagcattgtgaataggtcagaaatacccatcgatggtgcaatcgtgcttcagtgtttactggattttcgagggaaatctcccctttcgggaggaagacttggataccctggagagattctccggctgaccgctcttagagaccgctttaaatctcccgaacattttgatttccaaattgctcatacttcgatatggaggggtaaaccttccttttatcttattgataacgtcgcgtggcgtcgaggcacgtagtgccaagaattacccgaaagggtaatttattaagtcgcacagggtccccgagggtcacagttccatgccaagaatcgcctgtttagggagcggtcagaccacgaccggggccttcgggctcacttacagtacgctgtcccgaccaatggtcggaggctcttatgcggtatccgtggatccttcctgtaaaaagattacctccgaaggggaaattacgttgagtttcaagtctcaatttttggggcggcagtgttataatggagagtggagacactttatcccaaaaagttgtccaatcaagtctgaagattgtggaggtacggagtatacagtagctgcgacgccttcatggcctatccccagcaacagcgcggcagttattcacatcgacggtgtccccggtggtggactatgcctccaattcctggatgcacacttcaagaataaaaacatcgggccgatcagcagagtgcagagggtgggaacgcaagcgattattgggacattatccacagttgcgaccagtgtagcggaggcggaggcttacctcgccacggtgtaacattggctctggagacgagctatgaagatgtgtacagacatgcacaccctaccggtaaccaatctcctccacaggagtacagctcagatcagggaattcaggagataccatcgttcaccattcaccgttcaccattcaccgttcaccgttcaccgttcgtcattgtaccaggtcgcaaaagcgctgaaaagtatcgacatggaaacactggcagccatccatccattcaaattggcactatgggtgaagcgagttcagagcgatagtcaagatgtaccggagacacagaccgaagcgggcggagttatgcgaatcttggtcaacagatcagcgggggaatgagatggtaggatttggcgtggcgagtgaacttaaatgacatctgagatgacgtacaccaaagacaatcctaaatgggctgcaaggaggcatatcattagctaaggcgtgtatatgtagatctgtgatagttgccctttgggttcagctgccgggcgttattagattgtgtgtgtatctacaaaattatgttcccgcttgactaagaggatattggatacgaccatttgatctgatatcacagcagtgatttgtccaatttgatgacaagatggttatgattccgcacaaaatagcaatatacttttaatgagttaccaatgccagcacctgaaaatttgccattttatatcaccttccaaatggtcacatttcaatcaactgtgacaaacacttcggattatcgaacggaccagaaatattcccactgcagtacgcaaagccacgagttggtgttgaaagcgtcacgcagatccggtctggcttggtgctttagctgctattcttgcgaagctatgacgagaatgcgagaactaatagtggccgataagaccaagcactgagagactataagataaaggcaattatctacgggcaatgcatggaataatgaattcataacatgtcggtacttgttagagaactcaaatgattatgatcccatcggccgttgtttccattctccatcataactcggtccacatgaaacaatccttgccatgaatcacaggatagagaatttctttatattgtaccatacatgtcataatgctatgtagcatgtcaaacacaaccctatgaatgtgttctcactactaagtgtaagctatacgagctccgaactactaacaatggcttcggtatttcatttgcaacaattacgttcctacaagcctgctttcgagatgatgtgtaatgaccccccgagatgccagtgagcgatttctttctcaacgtatctgttgcggaggcgtttatttgtctaacataattttcaaagtgcgcatatctccgttcatacaagccaatctaatgcatgacatatattcatgatcactttctggcagtagtaagtactgctgcaaaacgatatttagaatcttccgaccgtcatctcttgttggattgacggaagccaatgcttggctcatgccttgtatgacttggttggcatctgggcaatccatgcggagcgcttcgaatttctcgcacatgtgactccttgaaaaactatacatgctctctacagctaagcgtaggatggattggttttcgatgtctcggatgctccactggaaatcaggaacaagaccagcgagcagttccaccaagcagtagtgttgcccctttatggcttttgacagggctgtctcgccaaaattatccaacagactgacatcagctccatatttgatcaaaagtttggctgtatcggtattcttggataagacagctgacatcaaaggggtatttccgcggttgtcaaagctattcaggagcacttgcccatgttcgggaatttgtagaacataaccaagaagatcgtcatatgcatttgaggctgcatagtgcatggctgatgatcctttcgtattagagcccatcaaactaattatccaattagagttctgagaaagaatgtagcaagcatcatgttgtctcttttcatttaaagcggtttcgaacgctgctgtcagttgttccgaaaactctagacccgggacagtacaattcagaagaaaattcatctttatagcaatcccttacaactttagttgttgagtgttctatctgcaactgggggagatagtcgactttaatagggagcaagtctactttcgctcagcaaaacgcctcttttggctaaatatgtagctttagaggatgaatgagccatttcaggaacagccgtaaatagaacgatgtgaatttgggtaaacgtctgagactcagacacgtattgaacactattttcccataagggtaaacggtgagctgctccagagtgaaaagtcgcttcggagagttgacaactcggtaaagagccaatttactgcatgaggatttgtgatgactcaaaaatagctcaccttcgcgtcaagccctaaatcacctgggcacagtatatcatcagtctgaaaattttgtaatcaacgcttgagagtagccattctgaataggcattctcattatagcttacttctgagctctatgaaacctactcatgcattttggagagataagaaacaatatcaatatccatgtgtatatacagtacacacgatgcttttgtaaagctgccctgttgactaggcgtccctgaagtgtagttcgttccgaacagggtaatatgaaatgagacaagctaagcacctaccgaatagctagtgcctaaagaacccagaaattggattcaatgacaaatatcagcttcgaaattggtaatcatgcgatcgggatgaaggtctctgagatgaacacagagaaactggagttgaagctgctgtcgaatatgacttcactgtatgtatgtcagtaaaatggtgacaactttgtacgtatagattctaacttgtagttgatgtaaaggcgaaggtagctactcaagttttccacaaaaaacacacaatttaattgttcgcagatctcatttaccagctgctttgcccgaatcagtacttattagctggggtatggccatgcacaacctgctgtcgtcaccgctgtgaaaccagctgtatacaggtcctgttactatctactctggttgtcttcaaacaaaatttcgcaccattttactacatcattagttgcaattaagacactgaggcttatttcgccaaatccttggtcaaacagtcaaagcaggactgcagaaaaaatagcttaatcacatgatgtatagagatcaagaatagatcaagaatagatcagaaaacttttctgtcctatttccgttatttcatacttacttcatcaatcccattacttggatggactaggcatagatgtattttacgtaaaagcaattgaatattgctatttttggataggatcaacgtaaataatgcgtattttaattttaatgttcctagcggccaacgcctcggtgactcaatcaacgcgatatgcgtcattaaagcgagcttcttcaaccacccactctatccgtactcaatcctctggtaatttgaatgatgaaggggagagaagtcggatatatttagccaacatcaaaggaaacaggaagtgtgagatctcattatagtagggcgtcgccctgatgtaccaaaacaccgtacgccctcgcctgttaaaggatgcgagaagtctttcgccaatcgctataattagcctcgagtggaaatcgtaaattttcgagcggtgtagcatgatgcctttattttacacaggagagtggacccaaagtttattgagtagcctgattctgatcaagaggtgagtgggcttgccacaacctccctggagagcctgtgcccctcgcaagctagctcatatgagattgcgaaacaagtagattgtgaaggcgttttagctgctaatgtacaaaagttggaggttccaagccgctcgcggatggtttgacgatgtataacgtgcgctagtttgaaaccacatccaccgcgatgaaaacaatcttttattgggcctgatcgtttagtagttgtattgcggtcacctcatcccatccgagatcagtatcaagtctttcatttggtttaaatttgtattccgccgtatggtttggatttctctatttctcgaagccaggtttaaatacaaatttggcacgcactgaacagaatgtgtcaggcatacagaatggttaccgttttcttacagctactttttatgcggtggctcattgggttgctgtggataagtcctgtaactttgtagcttgatgattatttagaattcaagttgtttacatcaacacgttgccctaaatgtacagtagcgaccgctttcgccttccatgtcgaacaacactgaaaagcttttccaaactctaaaaacatgctgcgctaacccgtatatagttatttccgtatttgagaatccgtcacaagggccggatggtataatactagacgcaaagaaacggcttagtaaggtatctgtattgtattgttacggttcatctccagaccgaccctctcttcccctcttctgactaccaacggcagacctcagggaacttcactgaaggctcaaattagaaagaagctggaaaacagcatgcaagtccctacggagatatacgatcatgtaaggcctaggattgtgtcagttgatcttttcttttgctcggtgcttaacattccttacagattgtttatcgtgtttggaacgtatacaatgagttcttatatttggcagacgatgctaggaaatacgcgacctttgaaggcagggctcgacgggacttggcaaacctgcgccttgtcaacagggccttctgccgcagcgcgtcaccttggctgttccggcatgtcaacgcagagtgtacttccacgctggtgactccacctctagagcggcttatacaattatcgaaaagcccttatgctacatgtgtttgtcaaattgacttcggctttaaggaaagccttccatcggataccagcacattatatatcgaggccctcgcagaatggcactccttccttctggtcaaattcaccaatctcagggcccttggatttcatgaaccgcccttatcgttaccgcaagcccagaaagcagtgtatatggagatagctatctctatattgcgttacgtgccgcttccaaacctgtcagaacttgaagtcagattttctattacccacgactttggacgtttctttccgaatgaaatcaattctttacaaatccctatcgaagacattttgcaacatcttcgacacctagaactatgcgtttgtgcatacacggattcggcggatcagaggcgcagacagacgccagttttgccggaatatgctgctcttcccaatggcacctatgccccccacttattcagaatggttgaaaatgcgccaaaactcaaatcactgatattgtctagtgtcaatattttagatttcgactctgtcacctttccatctaccgtttgtctagagtctcttcatctaggaggggtttccatctcatctgacgttctcctttcgcttatcaaccaatctgcgcataaaatgaagtacatcggtttctggctggtgaaattaaagtctgggacatggcagcaggtgctattgcaactgtgcaagttaccacgccttctcgatatcaacatcgattatggtggatacacattaacaggatcgagctctcatctggccgacaggctatttccaagtccggagtgccgtccagatattgaaacgatgcataatcttgatttgattgaacttggcaatctacagtggcaagtcaattcgaacaggatcgctatgggattacaacctttccccgatacagactatcaacatatcaataagccatcactggagtttgaagggtgatttcttgtaaccaccaagaagcttaaacagacagtgtgattttagtcaggttgaaatccagggaattgattttcaattttcaatagcgatagttcagccttctatgcttccaagagaacgcgttcgtgggagtggatatggtaggcgtacgacaaaagtaaccgggggtgggaacatattgtgaatgttcgtccttgttggccgtttgtggagatcttcaagtcttgcaaggcagatacaatcagacatgaaatggaaaagcaatgtactgccttttgttgaataataatggatcgtcagggaagggaaaagaagaaggagggtagagagagagaaactatctactgatgaattagatctgtcccatatgactgccttaggcatcgggaacccgacatcaagtgaagagatgcctaagcagatggaaatggaagaggttagccagtaacctctagtgtccaatgagttccaaagccatggcatgattgatctgcagtggtggaggttgtgaataagccttactgtcgaaccttgcctactacactgactcggaactgactgctacaaagtaccggctgtttgcagtgatgcaacccgcaagattaaaaatggaactgttgacatattacctatctaaagacttatgcttgccgattttgtatcgaaccttccagcaagcccaaacgtctagtcctagatctttgtattttccatactggtattttaagctcgtggtatttattacctggttaggtacacatcgaattatttgcgcactattcatccatggattagcacatcatgtgattatggtttgatagaggatccctgtgttcccaacatggaaggcgataccggtcgctactgtaaaaccgtttcagaatatagaagatggccttgctatcctgcagacccgatcaaaacgagagaatattctatcaagtatgatctaaccaaacacagagatctaaaatccactgaccattactgttagatccgaatgcaaagcccctcgcagagcgacttacaggtcttcctcttgctttggctaccgccgggacatatcttcaacatagtacgattgactgcgaacgctacctcaaggagtatgagaaacgttggaacatcagccgtcgccgaccattacagctccaggagtatcaggagcgtacactctacacaacctgggatctgtcatactctcgcctagaaaaggaagatccagacgcagcggaattgctgaaattacttgccaatttcgacaaccagaaactttggtttgaactttttcatgccggacttaccgatagctctcccgaatggcttcatgaagtgatcgcctatgacgtaaattttaacgacgtgatggcagtcttggttagatactaattacgttatagtggaccttctgttggatgcccggatgcctaaggcatcacatgtaaatagaacccagatagtttgcctgctctctcgtcctctctttctcctcttcgtccaccagaatacatacagtgctttctctatgaacttacacgtattgtatcaggttatgagcctcttttgctagttggaccactagcaactcttttctctgaagctattttcatctggagacttttgacgatctgaccccacagtggatccacctttgtacgtagtatactacacagattcggatccagccaataacatccaggaaatccttcgagccctaccggtaaaagctccgtttagtcatctttttacatcatctcaaactgtctcgtccaatggagacagcagtcctgggggagatagcaacatccgtggaggctactgtatacttggacaatgttatgcataattctatcctataacgatatacgaggatggtaccagagcaatccttgcatccctcatggttatcaccctatgcaaaactctacccatgcaggattcgctagttggctatatctgcatgatgaattttcagtatatattcgcatttttaccagaatttctgtctctggtggcgaaaagtatgacctaccaatactttcaagcatgatttcccaacgctacgactaccgactgtgttttattttcattcttccttagtacggcgataatagatttgagtatgtcggatatacacctcaccgtagttaaatctttcggccgatgtctcaggtttttggaaagccttgatttcgtggaatcatttttctaaccctgcgagacttcgtttctgggattttcaaaatttgctactgtgaacctgtcttacttttctacaaaggaactctactacataaattgatcaatttctagaaaatactgacagcgtacgtaaaatctgattatcattcaagaatattgtgagtgatacgacccagtatttctccagaccatcttagttcagatccatctttgagtttattgcattgggactttgactgtctttggagatctacaaaatgccgtgatacttcgtcacctacaaggtgaacaacatagttcgaatcttgtacaggagctttgtcacaatgcgaataacacatcaggggtagggcgatgccgccagtgtcatgagataccaaagagcccgggtcgtctttacttgaactgcagggttctagtatcaatcaagtaccaaaatgacgatcggagaagttgtgagatggaacagttgggatccacagataaatcccagcagagcaaagatgacacagttcaaattgagcttgttttggacacttttcagaattgaagtgaagagaaaacccgcgcccctcaacacctgctcagtccgacgtttggcacctttttggccaatactgtctgtattggaagggaatgcttgctcttctatcgcattagtcgatggtaaaactgcatcgtggtcttcggttgtcatactaccatgcgctttctgtgggtctgccttgtggtttgcttcccgtacggtgtcctcagctgggggacttttcgaagtgcgacttggcatatcattcgcatgaagccgatactctccatacttggcagatccttgcggggattgatttggcaggccaacttggcacaaccgactgggcataggctcgcacaagtgcctggcactgagcctagcatcaaaaatacggttgtgcgacggtaatcccagtgacggcaggatagaaaaatcgcgctctgtctctacactcgcggtttggccgttgatgaccctctgggacgacataggcgaacgctgaaaaggcagctcctgatccgtctccagaggaagatcgaaataaagatcaataatttcagacggcctcaaaattgatgaatcgggacctgctggagggaagtcttcatgtacatttagactacacccgagaacaatatgttaagataaaagcttaccagtgggcgatgctttgatctcatgagttatttttcttttttttgccgggggatagcatttgtctgcagaactgccagtggggctgggaggaaccatgagtttccacttttccagagcaagctgctctaatctatcaaatttgcagcagcgagttcagtttatatgctctgaggctctattcaagtgcacatgagcggccataatccatttctagtttttctcaagcctatttatagaactatatctcactatggcgtgactaggtttgcctcatgtatcaacaaacaacccttttcaaactcaaagccaacccagtttgtcgaccttgctggaggtcctccccagatacatgccacaagaaaatattatttgccaacacacgctagtccacattgatgggattgggttttccggagcactcttgccagtggcctgtattgattcgtacgcagaatgacgagagttttcagcggggtgtgtttattcacttgtatcttttgacatagctgctaccttgatatcctattttaagaattgtcgtcccttttcgtgagcaagcagttacccctagtcatgcaagtgccgcgattggatgatcccattgtttaacggtatgttatctcctgaaacaatctacgtctcaggtgatattgcaactagcatttggtctgctattaaatgacgaactgaggaagtagtcaaataccactaggaccattcgggacaggcttattcatcgttcacccaactcccccttgtattagtataggattgcgcgcagacttggaaatacggtgttgtagcacgccgagggtcgatcttcagcgacagtccattggattggaaatgctccaagcggcaaaccagtcaattgctgtgaccggcgataaggtattgaacagtgtcagcatggacgcgactctgaaaaggtctatcgctaatgccgggcttcggccgagccaggcttttcttccaacagatgcgaacgctcgctttaatttgtttcggctgcctttggtaccgctcggcgactgatcttttgtcgagtcagtatttgtccggcgccaaagccttcatcttcttcatgctactgatcgttttgcagccaagttgcacatgacatcaatgcgtgacacagccatttcgggtccagcactgcggtatgcacattcccaggttggatgttatctttctaccgaaaactacacacaaattctaggagttgagacgcgccctatgacctacgttcaaggtcaccaaacagacgtttgtcgagttgtttatggggaagagaccttgatcgtgcctttggtgcgggatggggaaccagtggcatttgggtgtggacaggtttccaccgcttgccatgtttcttcatgtgaaaatacccagtgaccattagcaaaagcatcttcaaaatcgtgagacagtccttcttgttgactcgcagtggccaaccaatcttggagtttgtgcaacatattcgtcaccttcatgcctttattcgcattgttttgatcgctggtatcatccaggctgaatcggtttttactagcagagttgcgcaagagctctcgcgattcccgcgattgtcctttgttgctctccgcctgtcagataaccaattcaccggcacagcgaacaccgataccggacatagactgttcaacatcgtgcacctcgatgacacagaagcgggagcatgatgtcttgtcaagattggctttcttgatcaatcttgtctggtaaattcaatcgtgatggcagtttctacttcagcatggctcgaaatcataagctccgcttttcagtcgcagcataccaatcctggaaggtagagactgactcgagaaacacgcgtcgggctcgctattcatgtatttcttgattctcagccgcgacggccgaaaatttgcgcgtgatctattccgcatggagttgaggtagacacaccgaggagcgaatatcttatcctagtggtgcaaccttgggtaaatctattcgtgtacatagtcgaggaccctaggcgctgggtgaattcacagcgcagggacaagtcaaccggatgggtacatctcttagctgccaaggtttgaaagaattcaccttttgggtaatgagctagcctaataggtagcccatgcggtctggggatgaagtctcaaagaatccccatgaggttgagacttgaacttttccacctccacggtaaatctcaatttctagcaaggagaagtcaataggaagagcgcagccaactgatctcctgaatggataatcgcaagtgccaccttcaagtgttgtgatatgagctgttgcagatcagaaatcaagccgcaccgattctatatctgaatgaagtccgaggtgtatttctataggtgcaaccatagtgattggaaatcaacatggcccattgctcgatgtataggctaatatatcacgctggattaacaactcaactaatatctgtggagcacagcatcaggcaaacttacagctgacgagaatcttaagcctatagccgagaaaacaagagaaacctttccttcattcaatcttacaaaaatggagtgtgttcttttctttttttttccccttcttgaatagtattagccgttcgacagcgtccactcctaatcagatccagttactaatacccagatacaatcagcaaaaagggaaactagaccatgctcagcgggcaagagcaagtcccgtcaaatatccaccccacctgtagcggaatcatcactctcagcctctacgctaacctcaatggggtaaaagggaaagccccgaggcctgaacttagggtccatatgattttctcggacgctacggccggccccaccttgacggtcaagcattactcgtagctcttcaagggagagattagccacgcccggaccgaggtcggtttcaatgtcaacaatggttgaggtgcctcccgctgtcgagtccgcgaagcccgtctgcttaccaacactagtagcgatatcatttattaggccccccctaacggtgtcgatcatgcgtagcagaacattttgttgatgctgaaagcgcatcgcggcattctgttcgtgcgtgcggacatcaggaagtcgccagttcagatatagcttttggtgagaaggggggctcgcatagcctcgcggatggcaagaaataaacatatggcataaatagcaggctggcttgctgcatccgatgtatttatttttctcgttgaggaatctgccacccgtctgctcaaagtgatcgaggactaacagttccgcatgcacgcgcgttttgcctttgcagacatccttggacagcagccgatccagttccttctttgagtagatttgttgcacctgctgcaggaatatatcttgtttgaccggatcagagaaaatacgatggctgatattatcaatgtcgcaagtacgggccaaaagagggatttggttctcccgcgacctgccaatcgtttcgatacgtaagccacgcgatagctctaagcgaagcctgatggtggcctcgatcagtcgtttacactgagccacgtgcttacccagtttatagagcaggttatggagttgctcaaagttatgggaatgctcaaggcttccagtggtgtgatgcaaggctttgaatacctcccggtcccggtagctggagagggccaggttttgcatatccttttcttgaagctgtaaaccttcctttgaaaggtgtgttgatatccatttgcgaaggttgatgatgctgtcctgatctactcgtggtggtagcgctttatcagcttttatgtccagtaagagccgctctcttagcagacagggctgcgtaccttttaatttaggctcggcattcaatcgtcccatcaccaaggagaccagtttattcacctgctgatagtattcgaagatctttggggcgttgaggcccagcacgtggacagtcaaaattttcatcacctctcggccctcttttgtgtccagtcggactgtaggattttcgataatccatgaaagtatgatgaggaccttttccagaagagtgacgaccgccgtatcaatgccatcgttcgcagctagcagaatcactatcgcatcgggggtctgttctagggccgccgcggtgacgtagccaggccttttccgatacgcacatatataggctatggcgtccacaaaggatcgatagcttttagtggcacttaatcccgggccctcggggaagatatcacctggctttattcgatccccccggacttcgcttaggattcggagcaagcagaggggctcatagagcaatcgtaatcttttaggctgatgttccatcagcgaagcctctggaagtcctccgctcattgcgtcctgctcgagcatttttttagaataatgatcacaagcatacagagtgttctttacgtgtgaatgtgcccactctaagtatgacgcgcatatatataatctcaagttgattctctcagccccgttatacttcttctgactcactgcgcccgggcgatctcatcgtctatctttgctgcccaacgctagccattattttgttgttcttttattccttttcctttgcttccagtggttgcgcccccctgtcatttcttgcaacggctgccaacgagtatccctatttttcggttcttctcacatgctacatgacgcaagttggattggagctatgtcacacggcgtcgatcgtcgtgcaaggctctatgtaatccagctgtgcacaagaatttccctgctgcagtctcaaagttgagagttcatattcgccatgtatgcgtctcttttcatttggcggagtaaaatgaacccgtgtctgccacgaaagtcagttggcagtacgaccaatcccgcatggacaacacatgctagagaaagatgacacgtcacgccctacatcacttcctcgtgtacttactcgtgtacttactttgagagcccgttaatcgaaaaatgagatgccacgtctccagactaagaccttgcggtgagacacatttggccaatttttcaatttgtactggttgaatccttttgtaggaaaatctcacaaaaagggagtgggaagaccattgatggtgttcaataacccgccgtctcgaaaacctgagttactgctttgctatcagtccaacccattatcatggccggcctgcaagacaacagtcaacttacccactccaacggcgagtctcatggccatctatctcccgcttatatctacactaacgcacaccacctatagatattcttatcggcacccttctctttcaaatatcagtaatttcatccttcgctagctctgggatgtcgcgcaaggagactgaggttagcgcgctatttcagccacctctagctggctgcgagactcacgcagatacaggactattgcaaagatgcttttcagacattcaactggatggaaataaagaggtctctcaaaatcgtcaaagacactcctcgaaccgctatcggagaagatagcagtgcccggaacctcgtagttgctttgctagggcagacctacagactttgccctgaaccgcaaagacttccacttttatggaacctcgccgacatattctctccttttgctaccggacaagcacatcgtcgcagccacggaatgacgagtgtggaaatgtccttatcgagttcctccagtccaggtccctcgcaacctggaggaaatagttctcacgcagtcgctctccatcggtacacctctgcgctacacgagaggggccagagagagaacaaaagtcttcagcgaattgatgagcagacaatcacactggatccgcctttgtttatggtaattgttcagtacagaaatctcacctgctccggtagggctcgaacaaagaaagaagctgcgcacttgggcgccaaagaaatttgccgccaactgaatgaagatctatcattagtgtgattattgaagagagagaggcttgatggcagtctgacgggcagctaagtcgagatagacaagtaaactcacactcaggaatgttccgcagcagtgttatagcgcaagagatatcactgaaagaacagtaggtcaaaatgaacatatatatatatatataaaccgatccagctggccgatattcataggggctgtgtgtctttgtgcaaaacatcagaatgaggcaccagtgattaatgggcgccttcaaaagcaggcatcgccgctaacacagaggagaaatcagagaccacttgcaaagaggctatcgaccagcaacatatctcagaaagatcgcctaatatgcttccttgaccgtccagctgttgtgatttttttccgctgctacttagctcactgcgataaagactatttaaaaggacgaaattcagctcaatgatcagaacgaaaaagtattattttatggctttagtataaaaagcccacagaacactaccaattttctagcggtgcagttagacaaattcacgaaacaaaacattggaacttccgagtgggtagagctaatcaggtgaaaatgccttaggcactcataccataatacagtatgtatggccaatcatgggtgtagacaactctgatttgtaatttacccctatattaacaatttgatgtgattcccggcgggtccgtcaaccctgccgaaccgtcaccccattaaaacttcaaattttacattttttcaaacaccatttacatcatcaaacagtattaaattagcaattaagatcttctgtagagaaaatctgaattgccaaagtataggggccaaaacaggaagtgcaggttcaacctggagttctagcgtaggtgaagcataagatgtataccttatactactacctccctggcaaccaatgtcagtagtaaggcctgatacctttgtttaactaccaatattagatatttgcttctttgattccgccctttttatcgtctgctttcggtttccctctcgtgaacgcttgaaaccatcccgcattaagatatgcttgtgccctagtttaaccgacatgttgtaagactgttgaagatcacgttttgtagtcgaagagatcttattagcagttaaatccggactcatgtcaagcctacatttgcgattttcgctgcttgatcgtccgagggataccggtagatttattgctacctgatgttgagccttgtgatgatggtcgatctggtagaggcggagattaaagacgaatattgagctttataacaaccgattggcgcctaattgtattagacctgtagctacaaaggtactctgaacaatagaatctttaaatgaatcgtcacgagctgccggaaagatatcaagaaagtcatcttttttgatagaatcgatgcctaaccggattattcggcaacccgtgatccatagacgcgctttaacacagcaaaacgaccaacatcaagaagtcgtaaaggatgagaggcatacagagacatatagattagtataatgttgttttcctggcaaatcttatcgaatgttgctgtaagatgactgttatggccattgaggaccaaaagacgatgttttctttttgtctgatttatagtatgcagaataaagagccttgagagccgataaacgccaattttataacttgtccagctatttagactaatgttgagagactaatgctttggaaggtcgttgaaccatcgttacataaaaacttttccccttgaaaacaacgtatggtggaagcgctcgtccagaggcgcaaattggttcaataacagtcatctattcacaattgccagcttataaaacgcccctccgactggtgtgactgtgtaatatttttgtggtcgcactgattcccatcgcaaaccctgattcgtcaatgttgtagatatcatcggaagtaataccataatgagtgattgttctttcaacaagcttaaattattcaatgatagtatttgggtcttccaccagggcgcgtttgtaatcatatttgcgagagaatcgagtagtaagctcaggatgtcgtttgatatattgtgttggccaatttttgccaacggtctggagggtatcatctccgcagtgctcaagcagtaaattggccatatctttcaacatcgcgattgtaagcgcagcacctctctgacccatagagattaaccaatcttgaattgatttctcttctagttgcgtgaatttctggcctgtgccccttgcttcatagagattaggaatgcctttcatccgatctacaagagtcgtgcggggacatcaaaagggcgagcagcggtaacgaccatagtaagtctaccattttgaaaagctttgatagctaagaagattttgccctcctgctcgattgactttggggccttttggctgcgctttgggggcatgataggcgcttaaagatagattgttgggagcagaaaattggggtgggatgacggacccgccgggagtcacgttatataaggatcggtaattactaggcctcgccaaacgcgggttcggggcgggttttcatttttccaacccgcccacgggtaacctatcgcgggttttgtatttcacaaacccgcccgtgggtttttggaaaatcttcgtgggtacccaaattacccgtttatacctatcaaaatatataactgatacataatatatgattagttagtctgtgtatttttggtaatttattttggtaccgatttaatataggaaatataatctaataagataaaatatctacccctaaatatatatattaataacggacaatagctatactatattttgggccgattgtctactaccctatattttcggatgctataaccagataccttaaatttaagtaggtcctagtcatataagtatcttctatattagaattgtcacccaattgagataagaaagctagttagataataataaatatatacttaaggttgtttatagtcgcgcgggttttaggtacctataggttaacgcgacctataaaacgcgttagaaaaaaaaataataaaagagtcctaatctaaggtaatagtatctctgactatataatactacattagatttgaaggctaagcctcggttacattaagatttttagaaaaatgtcgtcactattaactaattgatctttaagtctcttacccttaattaaaccgtcctctgattccttcttagactctgatttctaatcctcggtataaatattaagattatatatacttaaatcttacccccctattcctaacgcaagcgaatatactaagtagctatatagtcttttagggaaccccgatagagtagtatatctagttaataacccccgccgattctaaaacgtgtcggaccgaaccgtagaaagaactagatcctatataaattagagaacttaattaactttctaatatagtgggctaaaatggaatacgggtaagtactaaatagcgaaggccgatctagaattaagtggtcgatagatttgtattataccgaagtttagggatacttcaactaagttatagatatcttaactagccgacctaaggtaatctataggtcttatttaactttattagactacccgtaatataataaatataggataagtgctataggaaaatattagagatctaaggcttatcgatatagctagaaaagatcttactattagatactcgtaataaactctatttagaaggccttcctaagagctttatctaattataagaaatttactaccttatagcttaaagaaaggttgctaaagataatagcctatttacaattgcctttttagactattaagaatcctaagttcctagtactacttaatttaatttactctaacctaggagaattagaaatccctttaataaagactctacgacgttgcttatataactctattatagcctaatagaagtcttagttatataacttacccgaagatacgaaagtttctcttatattagattattagactagccctttttagtaagtatttatagcgattatagtatactttatcaataaagattagaactatcgtgaaatacttcttaggtttaagcctttatacagaacttatagtagcgttaatctaaacgaagtacttctttagttacttaaggatagataacttctagattatatctttagtataactatagataatataataaataataagactcttatctaggccttataggagttacttttattaggcggtactattaatataagagaatttattatacgcgtactatatatagcttatatgatttagctttacctaaagtaactactaggttatattaaagctgctctaaagaataaagaagtaagaaggttttagtctaatacttaagctatctatctaagagattctttagagtatagtaatatagcgtatactctcgtaaaggtatatttaacctagaaaaaaaagactataggaacttttattaatatttttcttttaatagattcggttatttactgtctttataaatataagcttataataaagagacacctttttatatctttaatcgggtaggactcggcttttcctcttctataatatatagacccactagaactctacttttttaatactttaaagagcgcgctggcttaggaatactattaataaatactaccgagactataaatatagctaatttaaagttatagatactaagtagtagtaaattgactatatagttaatctaataaggccgttctttaaatttactatagctctaataaagactaaagatataactatctatagtatctttcttatatataagaagcttctagaatatatcgaacgcttaaaccggaagctaagaaagaaaataataccctagaaaaaagatatatacggtactatacttatagtaaagtaaaagttaaaagattattacgagaagacttattataactatagatttctctatagtatagtggctttacttactccttagtataagctttaataaagactaaagatgtaactatctatagtatctttcttatatataagaagcttctagaatatatcgaacgcttaaaccggaagctaagaaagaaaataataccctagaaaaaagatatatacggtactatacttatagtaaagtaaaagttaaaagattattacgagaagacttattataactatagatttctctatagtatagcggctttacttacttcttagtataagctttatacttttgataatatagagtattcgtagtatattagcaagactttaaaaagatattataaatatctacgattatcttttatatagtattaataaagaaacctagagatactattctatactatatagcgccctttattataagccttagagttagaacggcttcttaaactattatatatagtagaaataagcgaaggagtcaggtataacgaggttaatcgttatctctacaagtataagtatacctagcttacttaatctaaaagaccgctaataatcttagcgactaccttaatactaccgcgtatatattaaagagagaataagagtaaattccctatactttcgcgactagctcgtgatttactctcagttctagctactagtataggagttaaaaggctatttaatagtacctaggatatttactattatcgccaaggatctctaaataaaactataatataagacttgataatatatatatactctaagaaatttaccttagagagctagtaatcgaatctattagattataggacagcggaaggggaggattaggaaaatctcgaagaatataagataaataaggagaataaagacgaagatatagctattagtaatatagacgagagcgaattagccgaagatacctatataagtcctactacttagagtactctaggatttgaaagtattaccttataggaacttctgtctcttaatcgaccgtaagatacaacgataaccgctattcgtctagacctagagagcgacgataaagatctattactacctctagttatatatctagaagagagatcttaaaaaagattattaggaaggatgataatacctttaagccggcttaaaggctataagctatattagtttatctgctatagagctataatttgatataatctccttataaaaacacttatcctaaactataaacttttaaaactaggctatgattctactatagttaaggcttttctgaaaagcggtagtagcatatagtctacttaatagtacctttaagccggcttaaaggctataagctatattagtttatctgctatagagctataatttgatataatctccttataaaaacacttatcctaaactataaacttttaaaactaggctatgattctactatagttaaggcttttctgaaaagcggtagtagtatatagtctacttataccgggataatacgttaatctaaataaataattttgtataattttgtgctagctaataaatccttctcttttaggagttataggtaatttaggtacctgtataggtcgcgggttgggttttcaaaaaataaacccacctacgggtctgctgactaagacctgccccgacctatggggcgggttttcgtgggcggattcgggttttggggcgggtttggcgaggtctagctatacctccaaactctttcttcttgattgggagaaaccaatcccgacgcgcgcttggctgggtgaggccaccgccttagaattctggcaaaactgtcattgtaatgtttgtttggtcagtaataagttatcgtcatagtactgtatattatatagaaccacttggaatcgcttggtggatcttatgatcttactagatcgctagctagcttcctatctcccgtttgctatattatatctgcttccacctattctttctatatatagcgaacggtagtctttgctcgctagtcatagtgtaatagcctctacttaccttatagaggaactaaacctggctagaaaagatgttttcgtctatcttataagttctactatctagtacacttcttgtttataactaacgttaatcctaatctagttctcctatctaaactttttaataaggatcgtgatcattataagagataaagtaatctcgcctcgataatataacccggttaacgggccacgaattataggaagactactcgtattatatcctaacgcctaactattatagcagccccttcgtagtactatcggacctaaacccttccttatctagtgtagttgagaatagcttagacttatcgagaacactaccctcactcaacctcaaaactttctagttatataagtaggaatacaggagagcctataacgtagacctactaacatatatctactactagatagagtaacgagtaactgttaataataagagatactatatctataacagtattataaaatagttaggtatagataagaagagcaagctactaagtaaggatagtaggctactcgagcaatagtataataataactttatatagatagagaaagggggaaagtacttagtcctacttacctaagcgaaaagataccgagctatgatatagctaggctcaaatttcgaagtatatatatatattatcgataggaaataccgacgatataatgatatcttaataactacctacgatactggtagaataaggtagcctagagaccatagcttattatcgaaatcacttttaccgaaaactagtactagtataaaaagcggtatatttataaatagcgatcattactaataacagataattactactgctattgtggtcaggggttgggtttttctggcgtacccggactcatgaaggctttggtcgtttgagctgtccttacatttgaaaggacataaaatgatgtgataaatccgaaaacttgtctttacagtctgaacagcttcctagtaaccatcgataatttgcaacgctgattgattgatgataataggctataacgtcattaataaacatgttcagcgtgctgaaaggggtccttcgaaagcacatatggttggttttccatgaaagaaaggaagtactactgcatcaaataaacaggcttagaatggttgcgttcacttgataatagcgctattaacccataacaccaatgtgacgttaccatatcaagcctcgataagctagtactattcgagatatagctagtaagccgtatactaagttcttataaaacactctactattaagaaggggggtaggggggttgtagacaacgtcataaaaacatcaactttcggaaatgctaaacttaatatctaaagaacataagtatatatcatatattaagcttacggcttactatctagagatcttatatttaaactacctatcgcaattattataataaccgacaatcagaaaaccttcactctttctaacggcgcttagattcctactattagtctcagaacctagtaagacaaggaggcctaagaagtagtagtccttaccgctctttacgtaggttatcgctatattaatatagtaagatagtagccctctcccttaataacttaatatagataataaggctaacttctatagctatagcactgagcctactattagtaaagctataaagtaaagtggcattcctcgagaggaaatttttgttaccagtaagctctagaacaataagcatcatcctaaggatcttaactaagcagtataacttttattaaatgatctaggtctagaatatctcgacctattcttaatatattagcctattacttttaagcgtagagataatcctttcccgtccaataaagataggaagctaatcactgataatattgactatctcgatataagccttattggatagtagcctcgagaatacctactaactagttaaagatatatagagctatagaaggccttattaaatccggtaaagctaaggctatcagaatttctaacttttcctaaaaggaagttgaacgtattcttaataacgtggcgattaaaccggccgtatactagatagagctctacccttagcttcaataaaagatattctacgacttctatcggaagaatagtatttatataacgtagtattcactatttagaaactaaaatgaaatttacggttctcgcgaggaatatagttagctagtgaatgatcagaccttagtagaaatcggaaagaagtacagaaagaccttaaactaagtcgctttaggtatatgtactacttataccgagataatgtttctctaactaactaacccttttagcctagggtattatatatagccgttccgttatccctaaatcaaagttagctgagcgaattaaacagaactttgatattactttcgagttagagcctatagatattaaaaatattaatacaatcgataagaagctccgtttcaacgacccaagtaaagactttagctacgaactatattcaggccttaataggaagaagaaataaggagaatttcgattaacctttatcaggatactagagtccggtaagtacctgatcttaggaaaagagatatagcggcgtcgtcgacctagggattcaatcatcatatataggtataatctcggcctttccccaatcaatacactataaagtagtctaaaaagctaatgggaatcttaaaataataagattgatttcagtgggtatcataaaaatgtaatccgaaagaattacctaagcttattacggagaacttagttcgctattacagtcgttgaatctcctagctataaatcgaccttcatatattcattgcctacgacatttcttctaatataatagaaggtaaacctatggccttggcgggaatcccttagaccaatagagaggccgagattgacagcgatgtttattgattgttgctttgttatattgatgttaaagctatatatatggattgagggggacaccaggtagcaaacgtatagcactttcccgtaaaaatacatctagtcatgtcttaatactgtactgtaagatacgcctatcagccttggaaagcggtctgaaaggcggagccttcgctttctatccaatcagaactcacgaccctgggatttattttccaggaaccaagtcacaagagtgcagaggtatagctgatttcgaataatactataacgtgtacctcttatatcaataccattaatttagcctcgtcattgtagaatcgcacggcagaagggtagattgtattgttactcttgacaccatcctatctcatagcatatgtatgttaaatctctatcacagttgagtttaggtaagcttatccccttataactttgagtaaggatatttgcaacttaacagtggcaagcctagtaaaagacacgttatcgtttgggtggacatatcatttgagtggttgaccctggggtgcgacggtctgtaatttatggtaataaatgtaaaacccggttatcgggttctacgcggaattttatctgttgagcccaagggagagctcttctatttgccgtaagccagatttgattctgtattcagtgatcgatcgatacctacctacataaatcctcaccgtcggcatatatatacagatgggggcgctcgcgcggccgtggatcacgttaatatactacccctcaaatcgacagtaagatctgcagaaaaggaacttcgtacggactattacgcttagagtgggagctttctagagaagaaagagtgcgtagagttgaaattatttcgaatatcactgcaataagcgttctgcctagtaagctctatcaaggacgaagttttattagtgcgtctgaggaacatttagtgctctcaatctgcctgaccttgaccctgattcgtaagggccttggctgccttgctcggtatagacttccccactctgtatccatcttaagtatctctgatttgcctttataataggcttcatccctttgcatattcgtcatgtcatcgagaaattactttagcaagtttgcaatgactagacacgcatggcggatgtaggagctgccgaagatataaccggggctagaaccgatgttgagatacttgctgtggtggcaccacaagccaagctgtaagaagacaccgtcgttaaaacagacgctacttcgtgattagcattatgtgaaagatttctcttccaacatacccagttcaattgcagccgcattagtctcaccggccatagtggggcatgagcaatgaatatagtgagtataatgatttgctatagtgtcgaagcaatctatacaggcagctcctccgctttgtattcaataaagttaatgagctagcctttcgacgtaagacgatatgcagggggaatgatctggaacccacccattctggaacaataggcttccatcatcatttcgaagacaatcactctgcttcagcgacgagatgtagacagctccatcatcgaaattcgggcacttataggtgaaagtgcgagaatccgaggcaaaatcataccaacattggtcggccaaggccaatggcagaatgaacaacgcgaaactaagaatggtaatttgcatatcgaagagctggatggagcgagataataaaaaaaaatgggcgtttctgctttatatgagactttgtatttatgtcgtgtctggctcacctattataatagatgttctggtccattttactgtttcgtgaatctgtttgcttctccagaagagttgtcccataatatgtacgtaatgggggattgtttttctatacatgtttgcggggtttggaggctccccgtgtttctcctccatagtacatgtgaaggtgatacaatacgtgtaagttcatagagaaagcactgtatgtattctggtggacgaagaggagaaagagaggacgagagagcaggcaaactatctgggttctatttacatgtgatgccttaggcatccgggcatccaacagaaggtccactataacgtaattagtatctaaccaagactgccatcacgtcgttaaaatttacgtcataggcgatcacttcatgaagccattcgggagagctatcggtaagtccggcatgaaaaagttcaaaccaaagtttctggttgtcgaaattggcaagtaatttcagcaattccgctgcgtctggatcttccttttctaggcgagagtaatctgggcatctaacatccccctcatagaatcctgcatgtactccctatcaagatctccagttccggcatatatagtaaaactctgcaaatttcttgtggatttagcatatgccaattagcttagtaaagatcttgaattgatcctttgcaagagccttggtaaatccatctgcagtatttcgcttggtgttcactcgatgaatctcaacatgtccttgcgccactgtatctttgataaagaagtaacgaagattaagctatctattcgccgatttgcctcctttcttcgagagaagtaattgtaagttgatgttatcagtatagatctctataggacactgctctgggagcataaatgatcgtgcgatcttgtttaaccacattacattacaactaggttgatctagtgtataccacttagcaactgtcatcaaattggctgtgatcgtctgcttctttgtagaccacataataggtgatccagtaaggtactagacatttccttctatcgatttgctatcttcctagtctatatatgaagtatctgtatatatatagaagcgaagttcactggttcgaccaaggataattccaatatcaggttttcgtctcagatactttataatatattacattactttatagttagaaagggtgggatttgctagtcaatgctataagtgtatcactgcgaagcgaatgtctggtcgtatcttaactgctaactagtttaacatccctacaatagactgatattaatcaaaagtatcgttatctagtatattggttatatcggctagtatctctctctatatagctggcaatggcatatctttttagctagaggttttagccatatatagtaccttttacatatacactttctgtgatatagtgattgtcctattagcatagtctctgtcgagcgtatagtttaaatactactttagcttaccaaggtcctttaagtcgtagtactaacgaagttcgctaataacttactcaatatcatcgtcggatggtatagcaataatgaaattattaatatagattattataatagttaaatttatacctttacctttgatataaacgtaaggattatcatccagcggacgaaagctaatctaatatagtttacagtctatctctttattctataggaaagcagagtcttacaatctaaagagcgcttgattaagtgtatatacccagtatttcttatctccttatatatctgtgtactcaaaacctataggttatcttatatagactgtctctacatcttcatataaagtattgagatatacagcagtaaagttaacttgcctccattttagactatatactacaattagtgtaagaacgattttaatcatacattcggcgacaatagggacatatatttctccatcatttttatcttagaaattgccacataccacctattgtactttgaaatcgtagactttatctctggtattagatttgatagtgaatttctattatcctggtagtaccttagcttttaatagcttaaggattaagctctatatgcctttagccttaagatcactaagttatctttatatagcctcttgccattaaggctagaaagggctcttttacacttacttatatatagatagcaagttaatgtcctttatatatagcggctttctattatagagaaatggtttgttaatatcgactttatctattattatattagctattacagacatcgcactaggtcctatagacccctatccatcaccctccgttacattattaccacccgagtcctttgcctttgcccttatggcagctcattaaatatcttagtctcgtttctcatactcgatagtgaggtatttctgctttagatcgtggtatcggtcaggtataatcccaatattcgcttatctcaatcggcggggtagggtaagagccggtatagctaggtcctaagagataggatctagcgataacttaattaagataatcttatagcttagtaatatctctgatcttatagtaaccggtgtgttcttagtgcttatcgttatctccgttatatcgatagcctatatgatcttacgacttagtaatatactgatttatcgagcgggtatagcctatatagtcttacgacttagtaacacactggcttaaggaactggtagagcttatgtgatcttacgacttagtgatatactagcttattaaacgggagaagcttattgagtaggagatgagaaagggtattagtaatctattctctatcgctctagagaaggagttatatcttctaattcctcagtaatagctctcttaatattatcggtatctcgacgaatattatctatacttttagtaagttaagatacttaggttaatagttattaaagtcttcttctgagatcttctttcttccactcaatatctaaaacctataagacactcttagtggtaggatctatgatctcagtgattcttacgcctattatcataggctcctctcccacagttaggagaaaactttaaaagagtttgcactattttattagtagaataattattctctatggtagtgccttctatggtatctcaggcattatagatacactactataaattattagaagataaattatagatagcgtaacaggtacttatataactaattgtataggagtttatatctatagtatacgtactacttactactacttcttttctggcttcaagatcttatcttcttgcgatagtaaaataggtatgaatctaataatattattattattatcaggatccttaggattagtaggtactttactagctagtattagtcctatactatcgttatctctaggttatagaaaactaatatcacaagatactactagtttctttgtgactagatcctacactttataaacatgactaccgtcccccttatagctaataagcatacctttctatactctgggtactactttcctagcctatgtcctcttaggcttcggaatatggatatatacagctgatccctatggtctaaggtgctttaaggaaggctctaggtttataatttcaaattcttaacgccaatgtataagcggcgagatcttagtctttagattaactagtctattatagatatagatggctatatctgttatatacggccacatctcttccagtatcttcgtatcgatgattatcgttctctatatatcattgatatatctaccgaaacgttctactgtactatttagctctgtggtataaggtagtatagtcttaaaagtcatactatacttcttaccctatttgatgaactctttaaactctatactgccatctattcgccagatacctaggtatctgccggtaagtaatttgatcttcttacagaatatagtaagcttatggtaagtatcacttttattctttagtataattccctcaattaatcgagtagtattattaacgactagtagctagtagttctctccatttagcctagtaggttttattagctatatattaatatagaatttctatactatatcttataccctcgcctattattaacgggatatcttaagctttaacttaccttaaaaataggtatcataatcgaagtattccgtgctatactacttatcatcacctaattatttagtatattatagtatggaagtaatgcaagcttttccagtatatccgagacgtctgtggatcttatacgtagtcactttgttcacaaatccaatctcattgttatcgttagaatctatatccgatttaatcttattagggttattatcgtcctttagactaataaggtataggatacctattaatatatctatataccctaggatatctccccttctatttatgagattcttagtatatatatcgtaagagatatcttattctttaagaagcttttgtatactaaatagcttactatatcccctaggagtatagtaaccagttattataaacgagtacatctttctatctaaacctagtagggcagcccttataatgactttactatagcctagtataacgactctattaccagagtaatccttatatatataagctgtattagggtaatccagttagtatgtgtggaagtccttaagatcgtatattaatatcttattagaactagtatctagtaaccaatcattcttcctattaatagaattggcagctataataactatattattctgtctatcttaatattaagttctctagatagcctttaaataggcccacaagttaccggacggttcctacgaggctagtaggttatcactaagataggcacatctctttacagtatatagtctaaagccgtagaataaatacatattattgtcatccttttatatgctattacgcatctcttttatatagtcataaatatctttactatcggtaggctgcttacaaagacctctcttcttcttctttttagtagtagctatatcttcgtcgatagcattaatatctttactggattaggtattattatctttattataaccattattatgactacctcggctactacggtttcctctacaaccacctcttccattacctcagccacagccggtattgttattatagacagtattagtaataccttctatattagtagctgcttagagtgctctctagtactcctccaccttattgagattaagtttcttaggtttaagacttacaacttcttccctaataaactagacctttttgacttctaatttaaggttttaaaggacttatgataggccgtgtactaggtacagtgctaccttaaatcgagtaagcatatggtactgtcactagtactccttaatgtactcgcttactaagttataatccaatcgtttcatcttatcgaacttccttatcttaaggaatacagtttacatctagtcactgccttatattatagctataagcttatcgtataattaatcagtgtacttaggtatctttaacaaattgtacagcttattctatagtataacatcgatttgattgtatatctagcttataactaagtgagaccagtacttctatcttttaaacgaagcatgcgacttaggaggtcagggaatatcgctttctagtagctattctaaagtatatgggatcaactggtaagctagtgcttgtttccaaccacttagattagtgtcattatgctccagtgtccttactttctgaattttagtcattgcaatcgttagcagaccatgtccctgataggacggcttattatcctcatcctcgctattactggcatcctgcgcaaattagatcggatcgttcaaggacaggacttcattgggatcaattgtgttaggcggtacgccgggaagggaggtttgtgggttggtatcccccacatttccggtcgcgacgtctgccatgattggattgtaaagctaaacggagcttttaccggtagggctcgaaggatttcctggatgttattggctggatccgaatctgtgtagtatactacgtacaaaggtggatccactgtggggtcagatcgtcaaaagtctccagatgaaaatagcttcagagaaaagagttgctagtggtccaactagcaaaagaggctcataacctgatacaatacgtgtaagttcatagagaaagcactgtatgtattctggtggacgaagaggagaaagagaggacgagagagcaggcaaactatctgggttctatttacatgtgatgccttaggcatccgggcatccaacaaaagaattctagagaaaggtcatggtatggagaagactatgtgctagcttcctggcacccttgtagggcttcaggagtttccagttgacgtatttgaccgttctaacttctgagaacattactggggaacatgtatatattccccaagaaaaagtgaaagtatgtctatcaaatattcgtacgtccccgtcgcaaatcttcctcattcgggcaaagatcagaatcattttctcaaagattggccagatacaaacaccgcgaaggattccgaaaagacatttacttttcagacaaggcggtagctattttcatgagatgcgggacggcgagttaccattcccgcgtcgaatacgccgctagaagtcttggatcgaggtcttatatctacattcgccatttgaaaactgcagtgcaacatgtttgttcattctccaaagatttcgatgtacggatcatggaacattggccatttattctagctcatttatgataaacagtatctttatcattcattgttctttcatcgatcgcatcgccgatgcagaaacaccacacaatacagacattcacctgaatgaattcaattcatcatcgcacaatgaacaaccgacatcgaagctccccaacgtcaaaacaaacccctccacattttctgtattccgatgacgcatgggcttgttacagaccaaaagtaagaattcattggaaataagacttcttcgggtcatcatcgaatcattgacccctagtaagttgttcgtcggtttcacttagtgaaaaacatgctgctcaatgccatgcagactttgtacgaacagaaaaaagcctctttgaacgatagacgttcggtccactagatctcaccacaaatcaactgtatctgtcagctggtgattgagatacggccgagctagagttcagtacatttcttcttttgtcgaagtcaccatatatttcaagccaacaatcgcggtctctacagtcgtctttttctccgcttgtaaaattcatgtgacagggaggcttgtgcgcatccatagccccagaaggaaaatcgatccaaggctataatgttcatgttagtaagtcaggtattaaggacgtatcttccagtggcacgggtgaatagaaagacaaactttaggaaccggccagtcagagaagtggacagtcttggcttctttgaaaactgttacaggattccaagtctcgcttgagtctccaagatacttagtatgtgattcactgcggaactctcctgacaacaaggtgtaagggcggtgcgggatgatgagcgcatgatctttgtatatggtattcacgatttccatatcgtagtctgatcctcctgaggttttgatagcctccaatatacggtcgaatgcgagatgagacggttggatcagcataagataggtggtcatgacacgatgatcgggatctaaccagtaagcccggggtatagcgacagggcacggaggtagaaaaaataattcgtccatatgctaaatacccaatattagagatataaatggctagaatattatatgaggtagaaacggtacttgcaacatagtgatatccgagtctaagctcagaacacgatcatactgtgtctgattgaaagccaggagtttggtaaaactctccgaccatgtcgctagactgtagtcagcttatcgattctcgaagcatgaaaagtgaatttgacatgcgatcggcctcgtttctagtctgcacttcgactggtaatagtttgacctggtattcatcgcgcgctttacgcagcaaccggctttgcgtcccgtgatccttctcatcaactgagaaatgtaacggatacattaggaaacgatcagccttgctcttgaggcgatgtagagtttcgaaaatcatgaccgaattgcataaataagcttcactggtagcatactgcgaatatgcaaaccttgaccagtccacggcagtttcagctttccagtgagagggaacttcgtgatgtggcggtctcgtctccgtgttccttttcgggaaaatgcttcgtgttggaacaaaagcgaggaagagaattgcgatgatgcctatggttcgtaaggtcgcgcgacattttctcgacatgattgtcttcctagagggataaaatggggactcaaattgagagttcagataaatgaaattggtactaggcaactattacctaacgaagtgtgtatgaggtcatagtaaccactagtttttcaacaatgaaaagataaacggctggatgtgggatggaatcaaataagaactttgaacaagctgcagagtgcagaagcgggcggcctctgtaacaaccatgtatcgatgaaaagtccaattgacgaaattcgcttgacgagtatgtccgagggttgaaatttgaggtttcttaaagttttttctgttcatgttagaaacgtatattccaatttggaaatttaaaaattaaacggagtttataatcttagtcattttataccaataccctagaatgatcatgtttatacatactgtcaacctcccttcagtgctcttgatttgttttttgacggttaggaaagaagaagtcttacaaaacagatcgacaacggtggtgttttgttcattgaagtcgcgtgattcaaaacaaaatctgtgacagccaaggagtaatatacgcgaggagtaatatacgagtttacagactctcaccacagccgggtgcgcaagagcgaaatttggaactgaagctctattggctgtttagattgtctgctcagtggtccatgatctcgattagagtgtctccagtagccatctcaacgcgctggtgatgacaatgaatctatttggtctatatatctatctcgctttgaatacgtgctaccatatgtaaattttgttgagcctgtcgaaatcggaacgtggttgatagatcactggacggcttttgatgatgcttgcgtttaagacaaaatttacgacagacaacaaaagagcgctttccaaccttcaggctggactgggaaaatagagtctgacgcagcaaccaactgaagaattctcagcctataccaccgagcagatcaatctgcaagttgatacgaccataaagattggggtagggcatcagggcaagggccctccacactgtatcacatgagaaggcagcttcagggaactaaggatctccgaacatctcgaagttttgctgatttctcccgtatcagtttgattggccgccagaatggacaatagcgattcaccgtactggatctcggttcaatagttggatcggcgtgaggtgaatcaaatctacgggtttgcgacatatcaaaatttcctatttacccaaaatatcaaaagaaaggatttttcccagccctcatgattagactgaacgaaacagtcaaaagagaaatactgactactgaaacaaaagtagagcgtttcaacggctattgctacctcctgttgtgctttatattcctttgtattttcagccttcgaacaaaacactcaattttagctcagcaatagactttttgagtagccttctaaagatatctatacccgataaggaacaaagtggtacactatatcctgaatagatcaccaaattgtagatatctcaacgttctttttactcacgccacaaaacctccttccgggatggtgaatgaacttcacgggcaatgttatcaagactctttaccacgtgctcgatatcgtctttagatgtttctggattgatcgtacacattcgtaagcagacaagattgtctaggtgagatgtgaaaataacggccacatccctagaagcaatttccttggagatggcctcgttgagctggttaagagtcgcgaggtctactccttgaggagcgtatcggaagtttaggatcgcgagagagctcggcgaaatgatctcccagtcatccaaggtactgatcatacactctagatgccgcgacagctcgaagccatgacaaatcatctgatcgaacttttgaagacctagtacttgtaatgtaaaccacagtctcatatggcgtgcgggacgggtcaattccacgccatagttccacgggtcgggaagttcttcttggcattccacgtcccgtacataatcaccggtcgaggaaaaactttccaatgactgagattggtcacgaaagaagacggcgccgcagccatgagtttgaaataaccatttatgagcatcccaggcgacgctatccgcgaagcagatgtccttcacctttgatcggtgagtctcagaaaacgcgaccgagccaccgtaggctgcatctatatgcagccacatcctccgaccttgcgctatacgcgcgaggtcttctagggcatcaatacttccagtattggtggtaccacagcttgccacaagtaggaatggttttcgatgattttgaaggtcttcatcgatggttttctccagcagtgaaagattcattcggaacttggaatcagtcttgatttcacgaatctgatgatccgggataccaatgatacgaagggcctttcgaacgcagaaatgagtttgctcggagatataagcaaccccgttcgaacgctcttcgactctaagggtttggtctcgcgcaacaaccatcgcagtgagattggccatagaggcaccggaaacgaactgcccgcccgctgacgatggtagcccaaatatttgtgcgatccatttgatcaggccggtctcaatagtacacacccctgcgctggcctcccagcttccgccgaagggattgtgggctgtggtcagacaatcgccaagcttggaaagcggcgatgctggggacggaatacaggagaagaatcgtggatggctgacggcgatccggaaggaaaagatctcatgggcgtccttgatcacttcttcaattggtctggaagcaccaggaacagccaacttcagcaagtcaataaattcccctggatcaggccggcggatgagtgttgtctccgaggcagctgtattgattcgggttagtagtgagctatacgtatgcttgtttagatcggaagccattgttctttttcagataatcactaagaagtgtttctctggattgtgggactttcttttgtaatcttgaacggaggaaaaccaagcagcgaatattgtttaacttggacggttacatttcttgtcggttcctctgttatcttatataagtagggtgagatgacaagtaaatagcgtaatccgacatatcctattaccccaatgaccgagcttggccggttaaaatgcgcactaaaaacgttcgcgatgaatcgcaatcatcatttgatacataagaatagttttctactataactaggactctcatgtcaagttcggtcaattagtgttctcttggtacataaggccgatttaatttagattttaagcatctagccacaacctgaaaaattccccaagtcagctggataattatatgtcatgaatgagtgaggcataccgtggcaatcaaactgtcatcgccttgtttgtcaccgctgagctcccaccacatacccccaccaaggccgttggacttgatgtactcacccttcttacgcgcaatctcggtggtatcataactgatgaataaccgtgattttgagttataacagtagctagcagctgcctcatcgaggttggttaccgcacagcagggctggggcagagccttataatcccaaacaccattctcccagctaccagctcctacgccattgtaagcttggccaggaccattggtgtcactgaaagcccggccgtacagaggcatacccatgacaatcttgtgcgaggccactccgtgcgagatgtaataattgattgcttggtccgtgttgaagggagtgcttcctgggttgtcgttggatgggtggaggttggcattgtgtccagcaacggtgtcccagcttcctgcataatcataggccatcaggttccagaaatcgagatactgatccatccgagcgagatgctctttgtggtaattggcggggcctagaatccgggttagctggcttatttgagtcatttcagaggaatgcacgtaccagcaggcgatgcagcggtgagcaagaaatgatagccgtcattattagttgaactgtataaatcaagcgcctgaaagacttagcagagccggcaaaatataagcgaaaacttgcctcgcgaagacgccttagtatatctataaattggcccgcttctttatcattagcagggtactatccagtatcagcatcaaacagcgagagacaagggactatactcacttcaaaatctacatcaataccgtcaaaacccaaattcttcagcagctcgatagagctattagcaaaattctggcgtccttcctcggtctcaaatgattttttgaggttggaagaataggtccagcctccaatcgataaaagaaccttaaggttgcgattcttcttcttgagtagaaaaagttgcttaacacagccatagacattgcttccgctatcagtccaggaatcagtggagtagtgtttgtcagtgtccgaccaatcatccgacataatcacctcgccggagtcctgggcattggcaaatgcgtagagaacatgggtcagtcgctcggcggggatatcttgagggtggaaatcacgggcatagattccctagccatgtttgtttagttgttttgatccagtgatggcgtattcaaatgacacgtacccagttcacaaagtaggctacggaacgatacccgttactatcacgagtagcaatgtcagttgaatcgatcttagttgacagcagactgtaggcagtattcgctagtcgcgctaggcaaaccaaaaaaagaacaacaaagtgcatgatggtggattttcaacactatatcggatgagacgagtcggtacaaaaagcgccacggaaagggcgagtcgtgttttaaatggctttgaggcaatgagaaacaaggtcagctatactcgaggccgacaaacaactctacaatgtattcctaagcgtgcccaacttggtaatacaaatcaatacttgaaagcggcggcattgaccctcaggaatgctcgacaacggtcaggccagggattcgtctgccaactatacaggttatgaaaaggctacggagaaatggaactcataccaaaattcggtggattccaacgagcgacgacaataaactgcggggtctggctaaagaacaggccagagccgcgacaaaagaagatgctctcccgcaagaacgtgtgccaagaatgaagccaacaacactgaatatagcacggctccaaggaatctctagcgacaagttgccggtgaacgcagggagacacgcaaaacaagttgatgcagcactcctaggcaaacacacccggcagctgtatgaccgattatcatagaaggaagcgaatgtgctggctcaactccgaaccggcatggcaggaatcaatggatatctccatcaaattaacgtggcagacacggaccagcgtgcgtgtggacaagctagagagaccgtggagcatttcctatctcgatgtcaaaaatggacggctcactggacggaattcctgtaacgtaccaacacctaccgaggaaatatatccttcttcctagaaggaaagtcgccttttaagattctgcaaaattgtgtagagcctgaaagattgacgtcgtagaaaccaagaatgagtggcagtcggttatgttgatatggtgatgtagagtgggaagtcctacaaaggatttcaacagtctatcccggctccttattgggtcattcgaccgttcgatgcacaaatagttggaggatcgttggaggggtcatcggcaactatcgtatcgttctctattatggatgtttcacgacgtatgctgttatacacaaaaagcaaaaagctgtgatttctctcttccgttcctaggagctcgattggctctcccaggaggtagcaatcactggcatcgataaggaggcaaaacaattgggggtatcgtataggccctgacagaactacttatttaagccgtcctatatccatcatttccttccttacctttccggcactcgcagtcccaccttcgaactttacttctcaagtcttttacaatttgtcgacacaatgatggtataatcctcctttctattcgaagatcttcttacaactaacgactgacacaatgatgcctagacaagcaatatgggtattccagctaagttcgagcttcgtgactcctccaatcaagcagctctttggcatgccgtctcgagatgcaatgtggcagaggtgaagctgctgctgaagagcggagacgcactcccggcggatctcaatggagtcacgccgctcaactgcgcaattatgcgaaacaacacctcgatagcacggctcctgttaaagcatctgagggcattttactccacgacaacattcctggacgataaagatgtcaacggtgccgagctgccactgtgtctggccgtttccttcgagcgcacgcagatgatagagctgctactcgaatttggtgcggatgtcaatgcggcgaatcggcgcggacacactccattatatcatgcggtagatcagggccgtttggaggccgtagaattgcttcttaaacagcaagacaccaatctgcaggcaccggatcattcagggtctactgctcttcacgtcgctacaaagcggaaccacaagtctatcgtgaatttgcttttagccaacccgaatgtcgatatcaactgcagagatggccacgggaacacacccctctggtggtctactcggctgaagcaagatgacatctccatccgactgctagctgaggatggtgtggatctcaatgctgtcggatggaagagcggttctacaacacctctgtatcatgcagtggaaaggcagaattatttggttgcggaacgatttgtcaaaaatccagagttggatccaaacgtcctcgggtctttccgttggacacctctcggtcacgccgcacgcgacggcaatgttgacatggttaaattactgcttcgaagaaacgatatccaaatcaatgcagtccgcccgggtgaggattccccactttggcttgctgtgaagtgtggtagaaccaaggtggttggtctcctactgcagcagggcaaacgattggacatcaactctcgaaacaacaaagatggccaaagcgccctgtcagcggccgctggctccggatatctacacatcgtgaagctcatcttggaggactcccgaacagacctcaatgctgtggacaagtcgggcaagagtgcaatgtggcacgctgattccaacgggcatcatcaagtcgtcaaggagctcctgaaggacccaaggctttgcgtcgatctgagacctattgcttcggtggcgggcagtcagtagatgctccgagttcgtcaagcgatatgggggaaggggatagccggatctgctttgaccagaaacgaactgcatgtcaatatttgtgcaatgcttcgactgtgtggttaggcttttgatggccctcggcttcatgtagccgacacaatttggccttgtccagctctctcaacattctttgccctggttggtggtcatggggtcattgatcggttggtccggcaccactgagtggttgaaccatcgttcatgttcaatctgctctctttggggatcaccgttgaaatccgtccatccccactctaatccgttaacccgtccatccgtttgaagtctaaccgttcggtggacttcgacagatgatgctccacgaaccatcgaccgatcttcacggatattacgtctctaaaacgacttctttccagaggaaatagtcagtcaataaaaacgtagctgattgtggtcgctaagggtggttgggggatcgttggaggggtcatctgcagctatcctatcgctttctattgtggaagattcatgacgtatgctgttagtagatgctccgagttcgtcaagcgatatggggaagaaaataactggatctgctttggctaagaacgagctgcatgtgaatagttgtgtaatgtttcaattgtgcggttaggcctttgatggccctctgctttatgtaggcagaccaatagccaaatcttatctcgtacatatagccgacacaatttggccgtgtccagctctctaaacaatctttgctctggtaggtggttataggatcactagtcgttggtccagcaccaccgagtggttgaaccatcgttcatattcaatctggaggccattagccagtagtatatagttaaagtcgtagtgccaagggctgctctgtttagggatcaccgttgaaatcctttcatccccactaatccgttagtccgttaatccgttatagtaatccgtttgaagtctaaccgttcggtggacttcgatagataatacttaacgaaccatcgaccggtcttcacggatattacgtctctaaaacgacttctttccagaggaaatagttagtcgttaaaacgtagctaattagtctcgtatatttatccgcattaaaagaaaaataatagctttcaaaagcaacgaaatgcgcgccgcgataagaaagtaatatcgagaggcgctatctatatatatccgtacctttttcccgtcttaggtatcctataaagaagaggaactgacgaatttcagataatcgacttagccttaatattatacccagctaagttcgcctttagctactagtcgaggatagatacgcctagttagtaatagaatctaagaaattattattacagtcgagcctaagtaataggaccgtcggtctgcttcgagctatatataaagaattgggccggtcgctcgaagtagttatactatagaccttatacgattctgacttagggcgggacgataatctaggggaggatataagatatcctctacctactagatttcccggtactaaataaggatataggaagatataagcgcgtataaggaagaagacgggttatttataataaaaatccgctaactagaaggcgcgaaccgcgagctaggggttaagctcgatagtactcgggcccggctagacgacgcgtatagtaaaagcgatcggttctagaaaaagtctcgtcggcttcgggctgagcttgaagctagcttactccgaaccagtcggctggagactaaattaacgcgtgttagagcgggagtcaccgaggcgataaaggctttacaaagccataggaaccagaatagtagctcgccggcggaagaacgcgatcggaattgatgtcaggaaagatctcgcgaagtggcaccgtaatccttgaggagaggttctggtagactgtgtcaacaaaagagggtcacaattctactagtgcgcccgaggtataattattcagcacccccctctgcctcatcccctatttattctgcactttctatagtatataaaaaagacactctcaagtactcaattggctatacccatactagtctgtactgtaacgaccacgttccgacagactaacttactaacacattggtttgtttatgttctataagcacatgagatgcgaccattcgtagaaattcccacttattttatcgagcctacttatcttaacctcgacaagcaggagtgggtggatcctaggttgaacccctataataggaatctcatattgtttatagtgaaaacgcggctataccctaaccaccacgcgtttttacacatcgataagctactatagataatatataaatctcctaggaaggaccagccgtaaatgagctgcgctagaaatgacaagtatgcgtttggtttctgggcagaaaagtatagagagacgatcatagatatatatatatatatatacttcggattaagagaagggtttcgcccaataacgctaagccgtagggggtgacttaaccaataccttataacccctaaaaaccaagccgaaagaaacctcgtagggaagttacgctagtaactaagttaagcgatattagaaagtatattagaggtctctacgtagacaatcctaatacgtttagatttacggcaaagacagcgatatctacgcgaagggatttcctatacggatactatatacgcgcgaatattatgcgctccttatacgtagccgagaaaattaattttgtggcacgtatctttatttactacgtttactagtatttttaattcccccctagcccctaattgctcgaagaatttgctctacctagttagccgtagtcttgtatgatagatagataggatcacacttactcgtagtagcttattaaccgatagtcggtttagatcctcggggagactctaggccttggggctctattttattcccggagagcttcttattattaagctttagaccacgtcggttagggctattagctttagagttacggcatctatctcggtcgcgtcgatttagtaactatactccgcccccgctatatattcctcgttagtattaccccccgaaggtattcgtaacctagactactccttacttactaattttaacgataccggactctataagaaagatcgtatcggtacttaaggtagctagtactctaccctccctatagagatactttattccttttaggacctactaattattagctattagtttcttaatagtagtaaccctttcctttaggaagaggagggaatagcccgtacgccctatacctactagctaaataattatagcgagggctcctttgtcgatagagtatcgcgaccctagtacctagcctacggataacttaaccgcttcctatactaggaaatcctgacctctataacgataatactcgagtaggttagggaagcttcgataggtaacctagtatatcgtcgctactaacgactcggcggaagagggctcctatttaagccgttagatattaactaactcggccttattacttcggagacgggcgaggaagattagccgcccggagacgggcgaggaagattggccgcccgaagattcgaacgatcgactcgtaggccagctatagatctttattaacttatcggatctttagtaccacgttttaattctttcgctgagtaggagcgggacgagctaagggggatcctacggtagatatttcgggctaggggtcggataggtatagctgtgaacgagaggcctgctcgatttcgagatctaaatcgcgctttcgctttagactaagccatatagtccgtggtcggacgaggtgagtctgattggagtctattttaaaggcgccgtatagagagggttgctagtctagtgagatatacttaggttatagtgcgactactttatactctagcgtctacaaatctaatcccgggcacgtctgcttaagagagaaccgaaataagcgggtatatttgattctccggccgtctaatattattcatacggtcggtagaagtttacgcgactacttgtatagcgatagcaactctttgtgcgggtcgttcaaggcctatcctcgtcatatattgatagaattataatctgcaacccatccaacgacacaaggaatagggagggtataccatacatatggttcgtggacatgaaagaaacagccaaaatgcccctagctcgaacgatgccaatgaatggctataagggcgatatcgctagcacacgctgatcgggataactagtaggatgtacctacatcccggagcagttaactatggccctaggagtagtcaagcttgcgacaatcatttactccgaggaagtcaatgaatctccacggaattaagctataaaattattttcgacgcttattgctctcgttaagactagagctatgacctagcttaatattataggagttctacctagtagcttttagggtacttttgctcaatctaggtattatactctctacgacgctatataacgggtgtcgtcctctcttataaatatactattttctagttcagctctcttttaatatatatcgggactctatctttcaatcggtacttagctagatttttagaaacccttactatctactaatatactagggtattagagacgatagaattaaatatcggaacgacgtactaaagatatctcgtatcaatagtacgatctaattaggcctattccgaggaggccctaatagacttccttataaattagtccttatagatatagtaaaatctatattatatataaaatataggcccgataactcctaagctaagtagtatacctaacaatagatttaagaatagattattaagtttaattaagtagatattactcctataaccccgaatctaaggatctataatatagactaactagttagtatcgtttagctatattatctcccgcagtatctatataacgcgccggattaattcctagaatgccggttacgttagtatttcgaagttagagataaagatattaggataatattatgaaggctaaagaagccctatttaaggctataactaaggtacagctagaatttgtcttttaatacgttagattaggttcttgtatcagaagggctttaaggttatatagttactactaacagtctcctctccctataaaatcgatactatataagtataatattagtagtataacagattatatcatccttactaccctatcgaccctacttaccccttctataacttatatataataaagttactcgagctattacgtagccttatcgatagaatccgctaataagggttatctaccaccccgtatatctattatttaagaagaacagtcaaaaattatatatagtggaacgatctatagtacctaccggattgacctacccgattctaaatactctaagttacccttatcttgattaagattcggagtaggtattatctctagagatagggcagtcgacctccgcgtatagttatattcgaacgctagtctaaggatactagctaccggtatagcttacgatatagttaagataagggctggttcgagtttatcaagtacccgctctaactctcgcgcgagtacacgggcacgggataaatgctttcgatcttttattactacttaagaagggtatactgtatatactatacgcagagaccgaaattatagatttccaggaataaataatagagtagaactagcttcctcttatgcttccttaatcgaagaaataaagtgagttatcatgctatatagtgcggagttccgcgcgcgcccgcaggaaacccaacggctagcatgtaggtaatttttacacgttggctgaccgtcatttaagtataacttagctacccatttctatgggccccgaaatattgcttctcaagccgacgtccaccgtttctgcatcctttctaggctcctagcgcctctgttttctcaaccacgctgttaagtatgaccttaaataactccgagccttaggaaccttcttagataccgtgttcttttagaagatagtctattatagctcctatccgctagctagccttataaataagatcagccaatttacttacttactctagctcgtcggtaacctacgttagggccttccgcgtagtggttaggtcttagtcgagctttccctagattttctctatacgaattacccgcgaattcactacagtaagaatacaaagtatttcctatagaagttaggagagtcttattagagatactttagtaagattgtactgactagagtatctatagcttagctaattaagcttaaggaaaaatgagtgttattaggtaggtcctaaaaccctaatagtcggatgaatcaagtcctatagtctcggtttatctagaggataaacgaattagtatagtaatactaccttagtcgaccacgtaactaaggtattgctggtttgagaacgttagtttctgcgggctagggcggcctttatattgaagaccggatcgctaaacggatccgaaaagaacacgctgttatctctccgtataaggctatagtatatactaagtcgatatggtgaagtggccgtcacggagacacgaggaaaagccacggcgagattatcgatagcgcagatgaccataattctgtttatactaatatatatataagtctatagagcagcgattgttagtttgtcatagcgcacatagttatctctaggcacggatagattactagatatcattttagttctacagtattatatctgcagtgctttctttacccgcgagaccatacctacactcctattaagaattctcaagacggtgggactggaggtaatatatattgtttgttgtccgccactctcgtcaaggcgaccgacggattttccaatcctcctttcctcgagattactagacggtgagtggaatactagaatgtgaattttggctactgacttttactaggatgtcactgtgaccgttgaagatgaacaaagcccgtcagcagcctcacagacctgactcgcaggtcactagcggtggtatactccatgtaagggaaatcgatggtggaatggccctggatggtctacaggacatgaaggatgaccgatttaagaacattgtcaatatagttgaagaagatccgattataagtctgcgtggcacatgcacatatatcgtttaaaaagactgtgatccgttgagatatcaccgcattagatggcaggcctctctgaggtagatctagtagaagtaattcttggacacgatcgaaggtgctggcactttcgttggaggcttcttcaacaaccaccgacttgaacaaccactgacttccacgttccttatcgatgtgctttttgtttaaacgttctcacttgaacgcttgagtttaaacatgcattgtttcaacgtgctttgatttaacgtcctcacttaaccgttctcacttaaacgcttgtggttaaacgtgctgtgtttgtttaaacgttctcacttgaacgcttgtggttaaacgtgctatgtttgtttaaacgttctcacttaaacgcttgtgttcaaacgtgcttaaacgtgtttagtttaaccgttctcacataaacgcttgtgctgaagcgtgctttgtttcaacgtgctttgtttgaccgttctcatttaaccgttctcacataaacgcatgtgttcaaaaatactgtgtttaaacgcttccctcgttctcagctatcctttcgtacaacacgctccgctttttaaacgctgtcgtcatcagcgccttctttcttttcaatctttataagcttctttctcatgcacactaagcgccctcgctttcaacgctactgatttaattgtcctcctcaatccaacgcccattatcgttggaccttcaagataagaccgtttgacacccccgacttcaacaccctggctttaacagattacctatcgctgcctgagtcgccgtaggagaccataggctacttttcaagtttgtccagactcagtatgacgatcttcaacaatttaatcaaccaaaggttacaggacagttcccctcgtctgaatgttgtgggctcagccctcgaaagtaagtcttaaggaagcttcaatctgaacggttcaattcgctaaccagtccgcatttttctaccactttccatctatcatctcaactagagcagtagctgtatacgaagaaaaaaataaaacaacggaaggctctggtcttacagtatgatagccatgcagtctctcctgtctatgcacactgcagaaatggcaaaggagcctatctcactgctgtctcctttgatcggtgagaggcgtcgcattccgagatgccaattccacctccaacttgttgacttgtttctcaaatccccatgctcgtttttcggccgcctgaaggcagtaatcatggtattggatgtaagcatgaagttcttccttctctgctttctccttctgtagcgtatccctgatcttgtcattgatgccaagcaaattgatatactcaccgtatatctgggcgataattgtctccagtctttcttttgaatgttgtatacgttgttgacgggatggagggtgtatcatcttccgtggaatatttggacgattgttggtgggtaaggctggatgggcgcctggtggggggacaatagctgaaaagcgcgatatccttgctctctggggaggcatgttggtgcttgactcggaattgatttgttggaattggaggtttagaggccaaagtgatgtggaatggcataatggtaagggaatcgtagcatttatattccccgatgaaaggagtacacatgacatgacggggcggggtcttgcgcaccatccctgtaagcaacgattcctggaaccaagcaaaggacccctgggctaaacatctgtttctgggagctctaggcttatgtttcggcgtccggtactccgggaagcgctgtgagggacatacacgaagtgcacaggtactgtacaaggattttccgaatttctctattgcaatgaagatttgatcggttcactgtatgtgacatactctctggtttccaggagcctataggcaccgaaaatttgagaaaaagacccatcgcgcgttttaattggaattatggagcgaatcatgcctcctgggagtttgtattcatagatcgccgggcccactggcttcattgacatgagcactatatatgaggctttttttcagatcggacaaaattcgaccattgaccagacggcgacagatagcccggacttgctcgtcaaatgccatctgtatcacgaaaactatggatccgaccaccctattcagaatggaacctccaaccccggagcagaccgaacaccaaagcaaggaaggcatatggacgcgcggactggaccagaatcggcgaggaagtagctcgatagatgagcccatggaggcagatcaagaccaggccaacactcgaccaggtagtggaacaccttacagcggcgacggcctaggcggtcgaccggtttatacccgacaacgccccacactatactccaagcgatggttcacgccagatctaaaggcccagcaagtcgaagtcaatcaactacgtaggaggtagcagaaaaactacgctgagttaggaagaacacacgctgataccacagctaccttctatgcaatacaatagaaacgaagagcgtggataagaactatcgaaaaagccaagtccttgtattagaagcagtttctagacgaagctagtaaagggaagctctagaaggctgcgatatatataaaacctcgagatatataggattgcgtcctagtactacgagtaggctcggaggagtatatctaaaacgaagacaaagcgaaagcattcctagatacgttcttccccgccataagtctacctaagttcaactcgccggttatactaacgacggaactcctatagcacccaatcacagaattagaagttaagcgattactaaaagcagctaaggggaatacagcgcccggagaagataacttaccgatactagtttagaagaagctttagaggcatcttaagacctttattattagtatctttatagtaagtatagagcttaggtactatctgagatagtagaggagcgcgaaaatcatcgttttacgaaaactaggcaagcctaattactctaaacctagtacctaccgcccaatcttactgttaaacacgcttagcaaactcctagaggtagtgatagcccgacagttatcctatctagcagagaaatatagcctactactaaacagctagttcggtagacgaccgggtaggactaccgagtaagctctactagtactatctagtgcgatcgataaagcctagtataagtagactgcggcacgatccacaatatccgcggatatccacaatccatatccgcaaactgcggatatggatattttttgatatccaagatccgcagccttgcggatttggatatggaccttatatccattggatatctgcggatatccaatggatatcaaacaatacaaacatgcctagactcgtgacctcaaggggtgtgcattattattatacattcctatgtatttttcgtgtaatacttggtactcgaggttattgaatattaccaggtaaaccgtaagtataatttctgaccttagtcagaaattatgggtagaaggtcaagtactgttctactcacagtagtatacaattggaatctctgaccatggtcagaaattcagtctatacattttttagggggtttatgaatttaaatcttctaggccctatttactatttatagatctaactggaagccatctggtaaccttggctgttttcgaatccgccctaaacggcctaatatactcccatcgaccagtatctctggaagcttatcatcctctttaacagcctcgtatggttgtttttaaggttgttttccttttacccgtctacattgcttagtactatcatcatccaagttattatcaccgctctcagtatactgggtagcctcgagtctagtctcttaatcctcctccttattatcactgataggctctaagaccttaagctatggtaatgatctccgggtttaatctagtaaagcagctttaccttaggatagatgctctttaataatccctagctcctcttgccgaagattaaagttagtagcaaactgatatagcattaggccacagattgtactcggctttaattgactacaacggtaataatagatatcataagcacagttaaatagtcgtttaataccagtactactagcagggatagatagaatgtcccttactatcctagctagggtcgggaagctcttcttatattccttccagaaaagtcgaggtttctatcactcaattctataagtaagatatcatgtaatctcgtcgttatctggttttacaagctcttctaatagctggttctgggatatataagcagtattaagatcacagtcattattcttattaatagctactccagaagtctccagtactactgggtcattggtattataggtaagtatcttcctatatcgatcaaactcttggcttaggacctcttgataataatttatataatcaatattaccctactaatcagtcgaggaaaagtaccagagtttctttaatagagagaagattgttactagagtatagatattactataaggcttatagtcggtagcagtgtagtacttagagagctttttctttactatttagagtgcccgtaatatccatttcttctagattatacctttattcttaagctttaccttagctgtatcgagataggagaaaagcttattatagatactatagatattatatatagtaatatcctttatctttgatagcattattataaaatcaaagaagggctttattagaagaagaagatactcgacttaacaccactcttctagattaagcttaaaataaagatattaatgattagtataatactaatcatagaatggctggagcttcttagcctagttgagtattaaaaatgttaaattctattatatccaaatatcttggattagaatcaatgtaggctctggctaaagggctataaatgcctcctgacgttgtgggcttatattaataaagactactagtccttagatcttctatacttttattagtctagctattataaggatctaggggtagaagatataccttttttaatatatctatgatctggataccgctagaggtattacacttattctagaaggagtgggttttttcctcagaccactctaactcaatctctttattacttggcactgccttaagcttcctaagaagcttatttagactcagctggattatatgcgcgatatatgggacacagaagattaagatatctgatgaatactaagactaaaggtggtcctagatactctgtatcaaagtattattattagttgcgttatctatagtcactaataggatataatccgagataccatactctgttaggatctaggtcatagttttactaagattttcaccagtataggagccatagagaggctcaaagcctagaagaaccttatagtaatcccagttataatcaataaagtaaccagtgatagttataaaggcctactagaaaggagaagtccagtaatctaaggctattgatagccgatacccctctagaagtctctatagaatccccttctagttattctggattattatatcgagataacatcgaatggtttatactaatggaattgtaagtttagtagataattgttaagcaacctctaattctatgatctggatactgctggaggtattgcgcttattctagaaggaataggttttttccttagaccactctaactcgatctctttattgcttagtactgccttaagcttcctaagaagctcatttagactcagctagattatatgcgcgatatataggatatagaagattgagatatctaataaatgctaagactgaaggtagtcctagatactctatattaaagtattattattagttgcgttatctgtagtcactaataggacacgatctaagataccatactctattaggatctaggtcacagttttactaagatttttaccagtataggagccatagagaggctcaaagcctagaagaaccttatagtaatcctagttataattaataaagtaactaatgatagctataaaggcctgctagaaaggagaagtctagtaatctaaggctattaatagccgatacccctctagaagtctctgtagaatccccttctagttattctagattattatatcgagataatatcaaatggtttatactaatggaattgtaagtttagtggataattgttaagcaacctctaatatatagtggaattaggggtattcgatcactcaaaagggcagatatatagtcgaaataaatcttagaatagtattagagagatggtcttaggtaaatgatatactagtaatacctggctagattaaagtactcaatattagctgctaaattataaagaacttaactactatagtaatgccagttaagtgccctagttaatataccattcttttaagaagctagtcgattcttaggccacttttttttaaatatactccagttttaaggtatgctattataggcgaagaactagtacgccggaatcttagatggctaatcatacagagatataccttatatataaccttcggctttccatttttatcatttataacctagtagaagctatcctagatatccaatttgctttttaattcctatcgaattgtattcctaatattagactaagatctatacttagttataagctactaactaacgaatttattgcataagtcctccatatcattatatatagaatcagatagatataaaacccagtgcttttgaaggggaggtctaacgcaagtaagggataagggcataagggttaaataagttaaataagtcagcgatatcgataggactagtatttagatacctaaaaaatcggagaagttattagggtaaatccaattagaagctaaatccatatctaaattagtgaataagaactgtgattaagatattaagaagttaataattataatatatagtatagtagggtgcttaaaagaatagagaggcttatatctgaagtagtagaggtttttaggggtaaagtaagcgtactaggatattctaacttagacttacttttgatatggtttacctaaatgattggctgtattatatattagtacggataattggaggatatcctatagattttgaggatatcttaaggatattgaggatatcttatagatattttgtggatattttgtggatatccataagatatccgtaagacctcgaaactcataaagtccgtatttcaagaacttctatctcggatttctcaagttctagtagtcagaataaattgaaaaaataatcagtagatagctaggactctcggcttttatttaagcctaaggttgaaataattcatctaataataaaggttttgattttctatgttctgtttcttacgaagtttattattgttaacagtagttaaatatatatttctatatataacttataacaaaatcgttaatctacggctatctttataataaaacgtcggactaagaaaactacgatactacctacaaatactgtataaggagaccttcgatacatatctatttcctaaaatttcaaagtgccgaccgtcgatttaaggggttggttctgtcaggactaaacatgcgtttatttcagtggtaaggaaatattggtaagctgcattaagatcatgtgataggctataagggggaaagtaagcgagagttatgctagtgcggatatggatatgaactcatatccgcagtgcggatgtggatatcaactcatatccaatatccgcaaattgcggatataaggatcgatctgatatccattggagcggatatgccgcagtctaagtataagtataaggtagtgaccctaatcgccttcgaccttaaaggtacttttaacggagtcaataagatcagcctagatacgtcgctataggtaagacggatcccgcttatagccagaaaatggattataagctttataagcgaccggcacgctaatatcgggtttgacgacttccgtacggagactactccgctagtgaactctaggctagcttaaggattactactttccgctatcttatttatattctttaataccgacctcgtagatcagcccgtcgactcctagggaggtatatcggcattcatcgacgattacttccgatagagagtagggggctcagtagaagagaatttgactaagatacaatccgaggatatccctcgtatcgaagagtaggcgcggagaacaggatcctgcttcatagcggagaaacccgaacttatctatctcactagaaaaaggggagaatatatagaaggacgaatcatctttaataggaccgacgtcaagccatcgcctacagctaaattactaggctatcaagcgcgccaccaaaacggcaatcgctttaagtggactacgacacttgcgcctagagcagatgcgacagctctaccaggcatatatcgcgcctatagtagactacgtatcgacggtctagcatgacccgcttagggacaaagttcatatccgatacttaaatatagttcagagaaccgtattgattagaatcctatcggcgtttaggacggtagcgaccgcgacccttaaggtagaagcctatatacttcccacataccttcgccttcgctaccgcgcgtagcgtacgattacgagactacatactctaccccgcgactatcccatttagagtgctctgttaagagcctagaaccgtaggaacaatatcggatcatacgcctacttcctattagtagaagcgctaaagactatggacgttggtaggcttaacgaactagagataatcgacttacgcccgctaccaccgtagcgaaaggacgcctttatagagattgagctagaacccgaccgagagatagcgagagaaagagcggcgtccgtaaaggacacgttatagtcgtctactcggatacctccgggcgcgagggtcatctaggagccgctatcgtcgcccttaacgataataataaagtgacggaatcttaacgggtataagtagggtcgatagaacggtggtctatttatatagcggaacttataggcatcttctacgcggtcagcacggtatttaagttagcctactaacgggtaagcgtcggagactatatatatacaatagcaataatcctttataatagtagatccgctttataagcaatccagaacgtaagaaatagatcagggtaacaaatcatctatacaatcctctaagcagctactgaggttcaagtagggtatatttccctccgtctctagtagatactaagatactataaaatcgccgggaacgaggccgcggatcgactcgctaaagaagcagcgcaaccgggtaaaacctatccttttcggccgctactaacgagagagaacgcctttctctatagtaggatctatacttagtaggagtaggagtagaaatcaagtaccaaaggcgcgtacctacggaaagtagacggcgcgctaccagcgaggtatactaggaaaatatacggaagcttgcctaggaaccgagtatacctactcactcagctacgcacgggccacaactagttatccacgtacgctaagaaatttggtttccgggtgcggcgtataggagacggtcagccacgtattgctagaatatccaaaactacgagagttacggatagaattaagaagaagtgttagggacgcgttgaacagcgtgtcgagtctgctgggaggctcatcccgcatatcgttcgcgaagttgggatctaaaccataacccactaggctgggtacggattcgtattttggtctagttgggaattcaactcgcgaggggacagggtaaatgaatcctactactactactactgtctgtattatcgagaccagtctgcgtcaatctaacgacctctagcaaacaagtctcttactgtacaaagacatacataattactctatacagtatgaatggatgatttcatttagcctgactcctagcttttatttgattataggccactatccactagacttggtacgcatttatatttaatctagttggtgagccagttcttttggcgatatacgtgatcggattgtccgtgaaggctcacgtatgtcaatgtttatgaggacctttcggttgtctccgaaagtgtacttgtttgcttgactcctgtaatgtaaaacgctggaaagatatcaattatgatgaaattggatggaagaggaacgacggagtctcgatatttagagcaacagataagaagattatggaagttcattctggccccttggctgagccttttgaccaatgccccttcagcgtgttttcggtgctttaatgaaccagttttagtttgcggatttaaaacgaggtggggaaggtatttcaaagcaaaaaacttacgatcaataagagaagaaggaacgaatagcggcgttgacacataggtcggttacttcactcggaataacatcctcgtaaggagggttgcagttgcagctcgtgctcaatgtaatgttgttgccactgtcggtagagaccttaaccgattccgtgccggttcccagagtctggcacccggcttcgaagcctccaacctcttttcccgcgcctgaacaatcaattgtggagtagtaagtaactgaccacagagcagatgctgaagtggctagtctaagtacgaaaggggtttcgaaacgcatgatttcgatgtttaggtgaaattaatgtatgatatgcataaaccaaattgagagtcagaatacggtagaaattcccttgttatatctccttccaaggcggagttgcaccttcacaggcaatacaatggggtctacggggctaaaacgcggccgagctctcccaaccactctctccatacgtagctcctgtgctttggtccacggctcagtgggagtagcaaccttacgtacataccaccggagcctaggtcttttcacacagcaatctctagaggtgcttgcatctttcaccacactcgagcttcgaggaacgccgtcagaagcacgtcgtcaatttaacgcggttaaccccatcggccccaacgcactctaggctcggttgaacgttcatgtgcgcatgcgtggacattttagtgattataaacatcctcattagaggaaatccatcagctcagctattctgggggatgttgaaaatccatgtttatgcaccccctgtttacccttccacgagtttttgacacaaagtgaattggtggtggtatttttacgaagaccaggagccatggtatactctgacactatacgaggcacccttcttagagagctgtgtgtcatcgggattttgtgtatattttgaaatcatgtggaagcttgggccgattcctgacgttgaggctgtgcaaaacgtttataaagccggtcaaaatttaactaactgtgttggttggatggcacggtgtgtgaatgaataagatggttggaatggcgacactaatcgctgtaatggccatgattaaatcgcagcttttaagacaagcctgtgactgttgcgttcttgacctgtatcaattgcatcttttgcacgctcaaacctcccatcatcactttactttgaacaacgggatctttcaaatcaactaaggcgtgtatgttagattttcgtagataccaaaagcaggtgatatttcaaatcagtcttgttgagtgttgagatcagctagtcaaaagtcgtttgttctgcggttttcttggaggattggtattgtgcccacaaaccaagaaaagcggtctaacgtgctgaattctaaatgcctggctacacgaagcctcttgaaacgtcgtatgatacggtattgagcccaatgtgtacattaccttacttctgcggttagtttctttgctcttacgtaatcgtggctgtggcgatgcaaaattgtatcgatctgtaaaatgtatcgtaagttatattcggtttgctgtattggggtttccacaaatatccaagtgcaattgcatacagtgtcatttctccttttaattggtatcatctctgaggaattctgggcatactgtagacccctagttcatgtcatgacttttctgatcgaagggtttgggcttgttggagggggagatggtcgactagagagcaagaaaaggacaacctagaatgtctttactccgcgggcgtttcaattgggtagaatctgaaaaaaggtgctaaaccccatgcattatactgccacttgatcatcttctacgccctggtttgtagagaaattatcggatgtacattgtgaatagaacagaaaaggtatatgaagcaattatgctatggcgccatttcccagtaaagcatactcgaaggcttttttttcttcgatcccgagaaaacctagaaacccgcctgaatacgttgggcttctgtaaagtagcgaacatggtggacatcttccgcatggcgtttgagcgctttatgtccactcaacacaagctggcaatatctgtcaggacaggttatgagctcagttggcttgtatttccgaagatgcttttcgaaatgttctcgagcttttcgggatgaggcaaagtagcactggtactgcggttcaaaaatgcagaaaaggcaatgtcgattggtgagcgagatgggacagcctcggggttctggtgatgaagaggactctgtttccgccgaaggcagttcttttggtagcgaaactatgttgctgccgatggcatattcggtttgtctctcagggttaaatctttcgggtggtactttccgaacacggccaagctcaatcagagcattgaccagagtgactcgctgtgccatatcatttttctctgaaagatcttgcatggatatttgcatcaattccgctacctgacgacgctcatccaaacgatgaacgatcttctcgggcgcataagcctgcttgtcaatatccaaaagcgagggatcgagctgtctgttgatctcaagagtatcgatcgtggaaaagaattcaccacgagctccttcaaatgtgtctttcttcaattttgccttggcacatcgcaatgcagcttccgtcttggctttgagctctccaattttggtgccagccgcgttcttcatagatccatacatctctttggcttctttggcaagagaatcgcgcatttcttacaggccaactatctcagggtgagttgaaagtgaagctcgcgtagtggcaggcaaatcgtcgtaatgagaaggagctcgagggtcgatatagcggctttggtgactcagaatgttcatcaatgcgtcctccgaaggtatcccaagaaatgcggcttgaacatgggactggacacgctgattcatatatatctgaaaggtgctagcatatacatggcccatcacctgttggagcaaaggaagaggtgcagtttctgaacagagtgcctgcgtcagctttggaagtacaatttatgttgtatgggaacttactttcaacagcctcaccggtgccacgccggagatcgtaaggtttcatagcacggggcatgcccactgcgagactcaacctttcaagataatatagatacgtgtggtatttgaggggtttgatctcatgggtgctgataccacaatgggtcgatattggctgacggcagataggcaaattgagcttttctttcacaaacctcaactgcaaggagtggcgcggcgattctacccgggaggcaaaaatgtcctcgatcgagcgaattttgctctcgaacgctccatcgaggaaggccatagcgaccacaagcatggcaatgtcaaagaatggctgtttcacttcagacattaagaatattttccttcaccatgcgatcagcctcgcataggaaaggcagggtacctaatggatcttcactcacttttttggtcttttatcatggcccttggtatgttttaaatcaacttccatcacgagatgatcacggataccaccaggattcggtagaagtatcaggcttatctggccgtagcaaagtgtttttagatcctcgtctctgagatcccattcatccattttatcggtttcagtagcgtcaacctcactcacacttccaaagaagcgctggacattagtctgctcgttcttttcaacatacaccaatgcccccggtcggcttgcagtataagccgacacgagtaagacgaaagcgagctggatgatttgccggccgtccggatatggcgtagtatctttcgtccagtggtaatgaagcacaatgtacaaatcatcgacgttcatgacgggcttttcctcaacagacctatccagattgaaacgttcaactaggtctttgttcatgtactatcacccttctgtcagaaaataaaaagagcagagagcaagaaaaacccacatcattgatatcctggcagcttttcgcgtggaggctacgccccaccgctttgcgatagagctggcaccataaccgccagttctcgtgcaggctgctgaacttttttattttagagttgtgcagtatccactcaagaaatatcatcacatcctctttccttgctgcgtggagagacttcaagtactcctttttccctagaaagtcacaatgcctgggctttgatcagcgcgatattccgggatatgataagaaaagacgcctacttaatccatcttctcttgatgtattcaatgttgttcttcgtggatacagcatgtcgcttttgaattatgctcttctctagttgtcggcggcgctgaacataatactccgggctaggtactatctttgccttcatgcgggaagcgtaagagtctgaaacagtcatggcttcaggtagcaataagcctagcagatgccagagaatagtggcaggcttcaggaaactgaatgggaaagaagctggttggtatggcgataatgacagttgcccagaaggaaggttggagagatacaatgtagaaaagactgttgctggtgagttggactgtagaaaggctacgagatgatggggagggggggcgaccatttaaatattgagaaccggtcttgatggctccgcaagacagacgatttatcatctttgtctggagcggctacaaacggactgaaggatactgagcatcacgtcatcactgatcaattgccctgagcatactgagcgaagggtgagcagatcactgagcagccctgagcatactgagtgaagggtgagcagatcactgagcagccctgagtgctcagtgatcaaaagtacattatgcacacgtgatgttatgatgactaagattttggtaaaaagggagcttaaaccggcgtccaaggtagccatttacggcagccgatttaccgtcaattagcgttgtggtgtaatcaattatcgggtaagatttatggtagatttcagcggtacggggcccaagtcacattatgttgagggcctactgtgtggcacaagcgagaagagggagagagttaagattcatacgtagggctgtatctactacgaggtgaggcttcttgaaaagacactcggaagtatcaggaactaaattgtaaagctgcctagtctccccattcatgtgatataatacaacgcacattgtgtgcatagaaatgcgtaagcgatatcaaattacattagcagcgctcatcatgcatccgtaggctgttgctattcttggctagcgttgaataaccctagctataatgttaattacttactaggattctcaacaaatagtaagccctacattctggggtccctatggtccagttactttttcaaggcatatacagaaaggcagggattgcaactttgaccataaccgccgattttaaacttatcattgcatgcctagaaaaggcaccatttccgataatctttttttttcaagactttattgtgagtattattccgtttatctgtgtcatacgatataagacattggattttatataaaccagtctgccaaatccacggttaaaactctcccagcttacaatcacaaaatggcatcccaggatggattaccctcgaaccaggccggcatcatacaacatgaaggtggtgttcttcgaatcactcatggtctgcctatcccagaacttggcccccaccaaatgctggtgaagactgctgccgtggccctcaacccctgtgattttaaaatgccactgaggttcccgaccccaggtctctgggatgggtgtgacttttcaggcaccgtggtcgcactaggaagcgaggttgctgcacagggacgattccgtcttggagaccaagcttttggtgctgttcaaggctccaatatgtcagatcccatgtctggagcctattgcgaatacattagaaccgagccggatctgactttccatgttcccaaaggaatggaccttgtcaacgcaacctctctctcggggactggaattgcaactcttggggttgctcttttctggtcacttcagttgcctggaacattgactacaccagcatccaaacccgaggatgttctggtatacggcgggagtagcactataggactacttgcaatccagatggtgaagctgtaagtatccccttccttcccataactttctgtatatttggataactgattcatcttgcttagctgtggccaccgggtaattaccacatgttcccctcataaccgcgacttggtgacatcatacggggcagatcttgtctttgattacaactctccaacgtgtgccgaagacattcgagcggctacaaagaacaccttacgctatgttcttgatccctttgcggaagcaaagactctgcggatgtgccatgcatccattggtcgtaccggaggaaggtactgtgcacttgagcaataccaagaaggcctttgtttgcgaaagacaatcaagcacgagctagtcatgggaggtgccatctccggacgaggtgtcgagctaccagacccatatggcattccaccacgacctgagattggagtctgggctcggtcatggtacctagagctccaaaaattgatagacggtgggaagcttaagccctgtccaactcaaatcattgcaggcgaatttgaagggatcttgaagggtttggacatactgcgaaatggaagggtctcggggaagaagctcgtcgtccctatgatcaccaaataaaacgttgtattgatgtggaggaaggaagtcagaatagcgcgatcgcgaattatttgagaaaatatacattttgatgtacggttggaatcccatgccagcttgtacacacgagactgctcatctctagattatcgtcatagtctagctttgaactgatttacacatcagatattgatctctttggttttcctttgagttaaatctcctgactggtgtgatgggctttggacgtacggagtagagagctcgatattatcggctactcgagtagaaaaagtgtcatcctatgagagtcgaaaagatcgcttaaccaagtaactctagaaggaagttaaattaaggatatgaggtacattcattcgatatgcgttggaaatacggaattatcgacgtaggtggtaggttaggggtctaatttggaccatcgtaaaccatcttagcaatgactttcttttcctccttggtcgtgctaatgtttcgtgtcaaatgtctccttccgtccagctcttcaaatccccaaatcacttctgcttcccatccctttgacgtattccgggccaattcttgaatgaccttgtcagtcaagctggccgtctccagaatttgacggatggagtcatccagtatgccagatttgtcgataaatttgagctgcatctgaatatctccaaagatgggcagcgaaatgtcttgcttgcttccatcaaccgaataactcccttcgctgtcaaagccgcctgggttgacagtttgtgtcatacgaagagtcgtgaatggtttcaaattgccggacaaatcagaacttccattagagtttcctcccgtgtgtgtgctttgtttggcggataggggagtggtctggtggatttgcagcgaaagccgggcgtatttcaacacctttcggacagcccaaggtacgccttgctattctttcttagtatagcgaaccaacatctcagttcagtattactcttaccaagataaagacgtcatctggatcggttgacagctttcggttctaatcatcatattagcccatccgttaggcaaatatcaaatggagaaaacgtaccaataaccaggttccagtaagatcaggaacatctttggaatcaggtatagccatcctcagggtttcagatttagcaagtaagttgggaatagttctttccttattttattttcgaaatgtatcactctggtaatgaggcgagtcgttccttttaatagtgaagttgaatattctctactccatcccagggattgctacatggatgattctaaaacaacatcggactcggactcggtgtccgaacagggaatatcgagtgcaaatatccattcatgcacagactgcggtcgcccatcaataaaattcttatgggttgaagagatcgaacgcagcgtggcttctgtacctggttgcttactcaggggtaaccctacaacaccctttattcaccgagtttgtgataaccatgagcgtgaggacacactctccaactctatctgagagttccttcatctcatctctagatgtgttttcaattttctttttgattaccctacataaactgccaggtcctaaaagtcaacacaatcaaggagtaagtagatattttagaataccgaccaggatcataaacgataatattaaataatcactggttctttaacaagctgccgcaagcactccattatttccattaaagacatttcacaaggatcttgttcttgtgctatgacaatgtcgcggattgaatttgaccaatctttctgacggattgtctcagatcgatcgaactctcgatcttcttgggattggcttgggcctgaccgaaatttaagggctcggtcaagtttacccagcattgtagagctgaattcaaccagtacttgaacttgggcaatgagattcccatccaaatgaaactgcccaaagtgtaccttcggtaacaacagaatcgtggctgcatcagttggaggaatgatgagaaatagctggtacaacctcatgaacacagcacggtatatgtgaacaagtgagcaatgtgcctccaatattccaagccacagtgctatatcgaatttcgggattgcacgagttgtcgcttgatccggagatgtcgttgtggtatgatacccagaatcatgtggagatactgtggtgacatcttcatccaagccatttccgccattttccgagaagataaacaaagagtcttcatatccgctgctctctgtttcaaatcgctgtgtagcaaacgcaacatccaaagtctcctctgtcataccacacgaagatcgaacaattgccaaaagccaagaggagtgatcaagcagacgatatatcggaaggtcgagggtttcaattggcaaattagaattttcatagaaaagggatgaagattccagaagcatcgacccagtctcaaatatctccaaatcctcaagaagttccaccttcaatctcaacagactcttacgaatgtcttgtatggaaaggagagcgccttggcttgttgtatttgcgggcggcttccttatagtttggtgattcacccatgcaggatctggaaattccttcattgcaaagggcgattcgttctcaccatggttgagacgtttggtttggaagggctcgtaaattgccatctcagtggcttgcctggcacctagtggagcatcactagtgaagactgagggaagccaagaattcccctcataagcgtacatttcatctgatgggatccaatcagaagactatagtaattagtagtcagtaaatgattactgttgttttcctcgggctccaacttactaggttataaccatcggtcgatgaatttgaatggggatcaccccaatgctcaacgggagccatgatgtttccaaagtctaggggcatattaaacccaacctccaccgagggcgaatggaagctgcctccaggaaagcctggcattgacgctactcctccccagttctggtgctctttcgtgttgtatctccctgggattggagagggagaatgcagtaacttcttcactctagggccggatgatttgtgaagcacagacattgattgatgccgttggttgaatctttggctctcacggtcctctcgcgcaactatattatgaccatagtttgagggtaatatgaccggcgcaggctggttcatacttgtgatacatatttcttgggccttaagacatcgttcacaagacatgccattcatatgatcgcgctcgcatcgcagcttttgcccgcgacaacgatcacaagcggaccgtcgagagtgccgataattgtggattgaatgcattgtaaagaaaaaaagagaaacgagaaataacgttccctatggtagccaacgagataccattcatgggaagctaccaagcgcaaatatgtacttcgttcttgccccactgaaattggatgcaatacaactgtcaattggtttgaatcattctcatcagcacatgtagaaagacttcaggctcaaggaaagacagttctattcgaaatcagatcctaggaaaaaggccaggagaaaggctagaaaagcgcgtggtttggtatcaccacgcctgtacacctctctattggaacatgatccacatcatgcttgaacatgaccttattcgttggatactcaatttttccacgcccaatcctaaagtgtgacaaattctcagctcatagcaacttagccctctcacaacatgtgtatagacatgcgtacatgcagacagaagtttaagggtatttttatcgcatccatgaactgaaggctgaactccagagtcccagtacgaggtgcgtcaggctttatggaagatgttacaccatgctcaaatgagaacaatgtatgagagagcagatctgctgtgatacaacatggaggtggataatgtttcacatagatactaccactccgttttatgggttggaggccggcttgacgccatagagcctaatcattatcaatgaaacatagactaccataaaataactaatacccaataaagagtagataagttcgatttggaagatcgtagttcacgttgagcccagaccacatcgacattcggagaattaagggcccagctcataatctgcttgacggttctgggcccctgatattttcttttccccccctctgctagatttcatattctccctccacatccttaagtccaccgattagtagtattccagtatcaactgtcgaggggcaaaaaatgcaaagtaaggggttgaaagcctgactatgctcctggccagagcgcggctggctttcaaacactagcaatgtcgacggattataggataccaaaaggaatattaggtataattcgaggacacacatatccacttcctttttttattactgccgtgtagaaccccgtgcgctttatctttgatgtcaaccctctaggtattcatttacattgaggctgcgagccgcttatatcctggatttgcgcctaatatatccgccagaccagcctcagatgggaaagatccactataacaacttgaaattttgtcgtaacttctctagttgtaataagccacttcttcatggaactcggttataatcagacaagtattcatcgatagaaaacaaagtcgaagagccttcatagggagtttgccttctgcccagtgtgtccattccactcctttatcacaacgcgaactccccgacttccttttcgcgggtgaccattgaacatgtctcgtacgattcgaacgtcatctactgtagtctcgtagagctccatctcaaattctcggaaaatggtggcgattgctagaagaatctccgcccgcgcgaggctggttaacagatgctagttagtacacgatttaaacagaacaatcaaggaaaatccacatacggaattccaatacactgtctggagcccttgctaaaagcaaccagatacttctcgaggcttttcctctgctctgggtccatccatcgctctgggatgaagctttgagagtttgggaagatatcttcattatggtgcataaatatgctggtcatccccaccggtgtctgatgtatattgtcaaaaagaggcctagatgaccgcaaaataggggaagcagatatcgtaccccgggaggaatgatccagtccttgtaagtcataacttgatttggagagctgcgctgaagccttgttgccacggcattggtgattcttcatggaggtcaaataagaaaacgataaggatttgccaggggagtcaagaaacagaagtcttcataccttaggccctccagcataacagatgtctattatattatcagatattttggcatttcatgaatcgagtttgcgagcaaacaacttacaaggtacggcattgcctcgtattccaccaaagttgcggttccattggggtcgagtcggttgagctcgtcccgtagcctttgtagcttgtctgggttgttaagtagatggaaggtgagtgttgtcagattcttggcagttgtttcccctccagcggagatgacggtgaaaacctcttgactcaggcggccaggcgccttctcctctgggggaagcttgctgtctagcaatgcatgaaacaatgtgcctttcggcacactaaccttatcatctgtcaagtttgcaccggcggtctggctagcaatgatcgattccgcgagtcgcagactttccagtttctggtcaattaccgggccgatgtgagggttaatacttacaactagccaccgtggaagaagctcaaacaagccgaatacccagcgaaactgtttgaattgaaccccgacttccacaattgcctcgattgtctttgaccactgtggtgtaaaatcagggtcgtctaaataatgaaacgattcacccatggaatactccacgaccacgtctgtcgtgtaggcattaaatgcatgataaacatgtagcggtgtctgtctctccttccagtttcgcattcctttgcgcagcttatctatcattttccggagcatgggctccaattgtcgaattcgctgctgagaaaagaatgggttcatgggttgccgacgtatccgatggtggcggtgatcgactgagccgaaagctgaggccggtgccccaaacatgccagtcaaatgtaaggatttgtttctcggtttgtctcgagagtataagatttcatagtactctgggtcgtcgatatgaagttcaaaggggctgattctcacaatcgggccgtatttgcgatgcatctcagcgattcgaaaagtgtactggcccccgaggaatgaatcgtaatagaactcataccacattgtcagagcggccaattttggtccggggaaatgggcgagtggtgaaaaccatagccgatatgttgccaaccacaccccataggtcattgcaagcacccccagggccaggatgggctgtgcgacaatggcattccaccaatccatggtattttgatttggagagaaagaagagactcgtagacgaggaaagacgcaaaccctgaccttccagttcggggtgtcttcttgaattgttgccccacacctgtcaagacagacattatgccactaggtcagataatggatacaaaacggtgattggaatccgtcctgttggtaacttcgagcgtcgtatctttgtggatagggaaggatccaacctatcgcggcacatccgtaccaacagaaatagctaatcatatggatattagttccactatgggtctgaagaatgtgtccagagcttaggatcatccatttcactccttctaagaggtccggatttatgacatccaagccccgtccaagggcacggggccgcgccctcggcggaaccttcaggatctggacaaagcgttaaaactgccgacagctgaagaatcataatcgtaacgatgaatcatgatgtacgacgattaaagaattgttgtcgctttcatttttttactcctcattgtactccatgcattccctttgtcttcaaatggatgtgacagatctgtaggttcatgtgggaatattcgaaatgcctcatagacaatgcgattgttcgaaattgcatgaaacaggagacacaataattcttaggtatttttatcattcgatgcgatagggctaccgtaatatcacaggccgatcgaaccttgaagatgacttggcttggacacggcacagtcccaacaaagacggcctaggagaccgtaaaataaggggttttcacacaaatcgatttatattgtcgtataattccatacagagtacggagttcatgtgcataaatcagcagatttgctccggccaataatatgtacctcgtattctttgaacatcctgcacatcctttcatttggcaagccaccacgactcatcctgcagagtggggaggtgcggagctcccgcacttccgaatttgtctaacattaaggggtttcatgacttttgcttcaaagtccaaagtacttggtagaaatatggaaacttcctatgcagactaaattggagagacaaattgtatacaactatcggtaatatcatcgaaatggatttcgacctccgagcagaccttgaaaaatcagcaatcgcagctaaggcgcgtaccctaagaaaactctggctgttagtcaggctactcagttcccgttgagttgatggcacaggtggagatgttgagactgtatatattaaagacaagctgggaaatggatcgtatcgtggcggagtacctgttgtccaaatcccagcgcccgcgtgggttgagatgagcatcgtgccatgtgtactccgtaacttctaggtaaatcgataacgctgtcaagctgccgacacgagcaatccgggtacgtcctggttgttaagacattgctgaccgatcagattcacggagatgatggatattctcgtcattacccctttgaacatgtcgttcacagaggagattcaaatgcggaggattggagcataaattttcggatttgctggcccaaagaaaaatgagatggaacgtgctgagcgtttggaggccaaaatctgatttgacctcccctgaaccaggtacttcggttcgggaccaggccattctgacagaagtacagccgaatctgcatcgacacaggagataggagtacgtagttacccgtaggtaataatagcaaagtactaggtatgacacatttcagaagatctctcgcatcattttgtgtaaatatatgaatgcgcgttgtacggagttcggagtagtcaccttgtgtactttttgtggccggaaatgccaggccggaaagccacgtggtctttatccttgttgccttgttgcctggtttctagagcttcaaatttttttgttcatctaccgaggtcttcccgtacaagacaagtgcatacaacatacggagtacaacatacaacactattgtgtccacgtgtgggtgctatttagttgaaatagtggcctataccaccgaagccgtttggaacatatggatagtgcaggtgcactcacacaggtaatataagtcttcatgtccatatcttcttcttgggaatgaatcccaaagattttcaatgtgaacttcgttattaagtagttcctaaagacctatacctctctttggctgttatttgcctttatgtctatgtatgtatctccgaaatatcggtacttccactacaggtaccatttacaatgtcttgccttcctttccgggtggttcggtgcatctgttacctaaaagatttaagaatttttacctctttactccacccatggatctcttcaaggaaccccaccgagttcgttcaagcctctgcagaatattttcaactctcgacaatcgtgaaacggcataccggtgaccttagtgacggtcatcttgttcagatcccatttccaatcggatacaccctgtggcggccctgtgatgtccgacatggtgtcccacgatgcttccgcggcacatgataccaaaacatctgcaaatgtgatctctgtagagtcggacaatgtttttcgagacaccaaagagtctgatgccgagcaaaatcacgcggacacctccaactctggggaactcaagcgcaggctgaaaagcaggcatttacagatgattgcaattggtaagtcttgattttcttggtcaagatgggttatcgcagatgctaactggcttcggtcgcaggtggaactattggcacaggtatactatcttgccctcaggtcctcggctagcaaatccagaagtctgacctatccaggactctttatttccagtggtactgccatcgcagaatccggccccgcgggcgcgttgatcgcctatatatttgtcggctccattgtctattctgtcatgagctcgttgggcgaagttgcaacctatattccaatgcccggtgccttcacatcctatgcagcccggttgatcgacccaagtctcggattttccatgggttggatctattggttcaactgggcctccacatttgctgtcgaactaaccgccaccggtactatcatccaatattgggatccaagcctaaacattgctattttcatcggagtgttttgggtgttcatcacggctatgaacttcctccctgtcaatttctacggcgaagtggagttctggttctcaactatcaaagtggccactgttgtcggcttcatcatttttgccatttgcatcgatgtcggagttggggagcagggctatctgggctttcgctactggagcacgccaggggcttttgccacgtatagtccccatctaccggtatctgtaggcaagttcgttggcttctgggcggtgctcatccaagccggattctcttatcaaggcacggagcttgtcggtgtggcggctggagaaaccgaaaacccacaaaagacggtcccatcagctatccgcaagacgtttgttcgaattcttctcttctttgtcttgacgattttcttcatcgggctcgtggtcccctatgacaacggccgcctcaccacggcgaccaccaacgcatcatcctcgcctatggttattgcagctgatttggcaggagtcaaagttcttccaagcttgatcaatgctgtgctcttgtccgtggtcttatcggccgcaaactccaatgtgtatagcggcagtcgagtcctcactggattagcacatgaagggtttgccccagcctgtttcggctgggtaaccaagcacggtgttccgtatattagcgtgacattcaccgctttgtttggcttgttaggtttcatgaacgtttccaatgacgcagggcaagtttttacctggctggtgaatctttctagtgttgcgggctttgtgacttgggcctccatcaatgcgtgtcatatctcgttcatgcgggtattggcaacccgcgggatttctcgcgatacgcttccatataaggccgtcttgcaaccatatctcgcttggtatggtttgtttttcaatgttcttatcgccctcacccagggtttcacttctttcatcccacatttccgggtgaccgacttctttgttgcctacatttgccccatcgtctttgtcgtgctctatattggacacaaggtgattttccgtccgtcatttgtccgtgccgccgatgccgatatcgacactggccgcttgcactatcaaaagcaaatcgatcctcccatgccatggtactggcgggcctggggctggttcacaaattaatacagcatagtcatccataagaacttttatatatgatttgttttgacatgtaggcatccatagatggatatttgcagtgaccctacgtaacaatgatttttcatacatccatgagccattcttggaatcatgtatttatcatgcgttgtgctcttaccaataatcatctagaaggacacctagccccagattctgtaaaacaccctcgaatctccacatgaccggctcacaaagcatcgttgtatgttgccgcggtttttatatccactttaagtgccgggccaccacagataatccgcctatcaatgcagttgcgccggtgcaaacaacgagtgtcccgtagccagtgccatatgcacccaacgcatgtcctcgccagttgtctgccttgagcagagcctcacttagggggccacttgccacattgccaattccacgccctgtttccatgaatgggaaaatgacagtcgcgtctgccaatggattggccttctgcacctcgttggagacacccgcccatgtggaggaaaagccacccgcgagaagaccataggcgatacaaaagacgtataaagggggaatagtggcagcaaacccccaaacaaaaaagactgcgataacggtaccgacagtcgacatcaaaatgcaggtagtgatgtgatatcggtcggaaaggaatcccatgatgacagaaccaaacactgcaaacaaattcacgagcattacggtgagagacgccatgtagtcagtcgcacctagactgcgtgcgtaggtcggaaggtatattgtcggcaagaagaatccgattgcttccagcgtgttgccgagctggtaaattataaaaactttgttgtataagaatcgaaaattcaaacggtgatatgcaacttctgtcgtacgcagcctcggtcgatgaaagtagagaaaaggcacagcaagaatgaacaatgccactgaggatatttgaagcgtagcctcaatgccatactggttcaaaagccactggatggcaagtgggaagacaattccggatacaccggacccgccctaagacatatatcagttcgactttccatcagagggagctcatggtgcagaattctgtgtaactcacccagacaataccaaaagccagcccttttcgtttatcgaaccactccgacatgaataggatggtgggagtataggcaaagcatccaccaattccgaagccgattccttgtgacaaaataagatgcacgacgttggtagagaaggaactcagtgccaaagacaaacacatgataacaactcctatggtggacacccagcgagcaattttaggcactaaaatcatcaaaattattgccaacggggcaatcagatatgcaataccctatatgttgtgttagcgagagagggcgaccttgagtatcttgccaaccaaccatcgcacaagtgccaataattgcaatgttttcggatcctttgaatggctcgtgtgtactataatagtcttggaatataccaaaggcgaatgcataacctagtcgcgtgttagtttcaacaaaaatccatcttcgaccaagaacaataagaacgtaccccaaactagagcttcgagcattgcagatgccataagaaacagccatgcttgaactccaccatcaaccggcggcaacttctcatcgtctagaatgattctgctgtcggactgttggtcgaagggtatgaaggatgtactccggctggtgaaactaggagaatactccttaggctccatgatgcaaaatgacccacgattctaaccacaggcgtgatggatatctggaagtacaatgggtttgtgtgtggaagccacggggagaacctcctttgaaaagggtttatattcaatgcggccgtttgacaagaaagccaggatcggcctagaaaaaagaaataagctaatggaagctagctgcatgacgaaataaatctccttgacaagaatccacccaattggagtgcaaagaagatagcgcaaaaccacatacctggaatccaggtagactggggtcccaacaatgtgatattgaacccctagatgtaccgatatggtccgtttcaaagtcacgcgtccaaatagactgtaccgtggtgatctaggtctttggttgattctagtaaacatctcctcggtggagaatgtattctctgtcgttcttcgctcgctgctaggacattaggcagaatgtttcaagttactgcaattcgaggccgcgtcgatcgggtgcgggatctgctccagaaatagtccgaatgaaatgacaacggtctcccctagggctggcagactgtttaggtgcacgaaccgccccgctcggcggataaaatgggaaatggaatgttgatcggggatcattgcatagcagagctggtgggctcggagaattccatgttgataacaggtttccgacccgctgtcattggcagagataagaaccaaaggagactcacttttgtcctaatggatgaagcttcgtcgctgtgtagatccaatcagtatatatgctcccatttctaaatgaggtcatgcacagacgttgactctttgaatgcgttaaactcgtttgatactaccaaatgacataaattccagaatcacatgtctttaataagatatcgtcagcgaacgggacaataaacaatatacatacaatgtcatacctcttcgaacgctacacggaggggttgagtgacattccagccaacggagctactacatgttcttccattgaaccagatagcaccgtctcctggcattattagagattccactcttatcacagtcaagggcattaatgtccatcaattcttcacaaaccagctcggttcctatcatggtctgcgggtacagtcatcgtgcattgagtcccaatgctttgttggtggcggaaaacggctcaaatatgttttggacgatcgaagacaatctgttggtctgtcttgttatttaaatgactgatgaggttcatatggcacatggtctagatgatttgagaaggaggtcagttatgcccacttggacatctgaggttgtttacgtaatctggtgattccgggtgcaggagaccatcttgctcacattttgaacaaccaccgtataagacattctatgtcgtcgaatgaattttccaagatatatagcctcagttctgaccagctcaacaggtaaattacgccatttcataatggatttgtaataggcatggtccttctattctcattctcaatatcattgaattgaattgaattgagtcgagctgggagttccagactgcgactattgacagaagggagttaagtctgtagggactcatatcccgaggcgatcgaagtggaaagtgtattgctcaccatcccgagaggcctccgtataggtcagactgtcgccagcaggaacgtcagttggaggcgaaacatgatcagcaaaaccgcaattttcatcccaaggcagaatgaagagggtctcatttcacgaaggcgaatgtcgcacggcctcatagatgctcttgacgaagacctcgtccatattaatgggggatggaggatgcattgacatgtaggagcgacactcggggttgatccaagtaaattgtagcagaatcccagctttggcatcaatatagaactgggaaatcggaatgacgttatctttgccattcttcgcaatattttgaatacaaaaagaaaaagatcagaagttcctagtttttgtgacatatgatatgatttaccttctgagtgatcagagtaagtggtggtatatatatcgtacaatatcatccaagtattcatagtgagatcgggtgcattagcggataaccccttgtatttgctttatagaaatgttcaggtcaccgcatattcaatggctgcgctgtggattttatacttttgttcgaataatcattttctgtcttatgactatcattttacttcattttgcagactactagagttttgcatgatgagtcgaactacactgtcccgtgaagaggtcagctttctaggtctcggcgccgaaagcagcaccatgggagcagttccagcaaccccggtatccaggccgataaccgtcttggtattaatgaaggtgggattttgcttcgatgagcgagcttgctctaagtgcaccaacaatggccacttcaatttgatactatagaccaattcaagcctgacgtaatgtaatgccgacaccaactgccaacccccacgttttgaccattgtattccttcaaaatgatgactggcaaaatatcgactcgatcacaggaattgggtccttcgaagagtggtcgccagggctcaagaatgtgttgtgcccggtacagtcagggccgctgtactacagttagtgacagtccaattcttgatcggcacccgacttacgtgaagagacggcatggctttttcaaagacacgatgagaacgtccctgtgactcattagtctctctcaaccgaaacatggtaggtggaaatctatctcactcttcctcgatcggatggcaatcattcaatggcacatcaataccacggctcttatcggccgtttcaatgcccacctgcatggtcctgttagcatcagagcgtggacttcaggaagaacatacgcacgagtgttcttttgggattcttcgctgccgatgcagaaagaagcatcaagcttagaagcgacagctgcttgagaccgtacatgatgcagatgacaaacagaggtccgataatggtagtaatatgatggtactccgtataggatatgtactcgacggtgcctgcaagtaaaacgcagaaggtcaacgactcttccagcaagaagatgccagctgtctttcccattatcccttgcgtctgtttctccgagtgctagggttacggccaactgtatcgtgaggttcacacccttttttgctgtgatctgccctatggaatacggagcatatcgtggagatcagaatatgactgctgattcgcactgcacggagtatcgaaggttatggttgaggtgcagtgtcgatctaggagtacccttgaatcttgggtgattctgaattctatggatacccatagaagatagagcacgttctgcaagtaacgtgaattagttaataaatactcgtcaaaagacttctgaagtctccaatgtcctaaggagtggaagtggccaggcgatgtctcccggttaacctccacttcaacaacatcaacctcgattcttttagtcgagtctcctttctttgcattttctcgactacgctcctattcacaatccaacaaaaactcggcggtttcattatttgatgagttgattcattttttattggactgggacaaccgtcgcatgtttacgccatgagcgactggtcccaccctgacacgactgcatccaattccaccggtgctgcatttactccgccctactgaatgcgatcctcgcgagatccgcccaacagatggaaaggaagaagggggttcaagactcatatgacagcctggagctttaccaggaagcgattcgcctgctaagccccttactgcaaatgcgcgatcctaaagttgtcggggcctacgtactgctctgctatcttgaggataatgtctgcttgcgcgcaggattggcgccgtcatttggagggatgtgcggcatttttttacgccttcgaaatgaatgggttcagcagcggtcttctcgagcagtgttttggtgctacgcacgcattggtattggtgagaatccatgttgttacatttttgccacacgacagcgcatgcatccagtgcgacatcgggtcagtcgagttgtttttgatgcttcatggcagcatattggaggctccagggctagaggggagctccaatctagaaggtgccaagcctccagattaggaaggtgcaagcactatccctgaccatcacctgatttgatttgtcaccatgtttacggtccacgggttgccgtggcggcaggaacttgttgagagtcaaacctgacattcaataataaatgctacctaggaaatcatgatgaacaatcgacacttggcgcaactacggtttcttccctgccaaacctcgactcttcttccattcgtccacgattccagcatacaccgaaggcctatacaccccggtcagctcagtgtagaacccacctccgagccggtggggattcagtcccaaatcgcgcagtagcaagtcattgtactgatcgaatcgttagattacgatgtccttgtggtttcacgcaacaaacatacctggatagcttcaacttcaaggccagttcccgtcaatgaacccaggaccacatcctcggagatagcgttctccataacctccagcggaatattcccaagcgaaaaagcctggtcttggattgacttgatgtccgcgggggagtcaagccctcctgttaaaaacgccgccacccaaagagcttgaacctctgcaacaacagcaatggttgatgataaaatcacaccgagcgttgcgaaggagcggtcacctcgtgcgactaattcgggggcaaccatgcggcggaacaagcgatatggcaccagcctgtgagattcggcccacgagggaggactccgatctgtgagagcgcatcttgtcgcattcaaagttttcctgaccataaactcggaacattgatctagattgtcccagcgttggatacggtcattcatggttgcctcaagcggcccattgattctctctggtgtttccacgcgaatttcacgatcctctcgaagatcctcgccctctgagtccacgacggctgacaaccccaattttagacgaagacttgcaggtttaaacctaatcggcactattggcttatatccggtggcgtggatgaccaaatcaacttcatcaatacaattgctgtctgccaagtgcaccgaagcttttgtgaatggatgcgtggtcttctccggcctggtagcgacaatatccatgatggctgatcggtaaacgttgacatggggtaatctaattgtttcccagaggtcttcctggtttgcgatgccaataccggatgcgcatgagacaacactagaaatcatcagtcttcaagtaacacaaatgacctctcattagacttacctgttctctgggcgaagcttttccatcttcggacctgagccatattgcgctgtatcctctaagcctttatcaattgatcgccagagccaacgaatccaccatcggcctattgggttgccatggaatagccgggctagccatgagccctcccaacggagacccccgggtccgagagacagacgttttggagtctcatagcagcatggggtgagatggctgagcagtcggctgctggcagccttatcacttgcaacggtgtcgccattcgggagagtagaccttggcggtaccatctacgcgggccctacacctcgatcacggatgatccagtgtacctgaacaggatttttctgtgtggacttgaggtgcaactttgggtcgttgcgatgtagagttgcaaagaaatgcaccaggtcaaaggatgattttgcaccaccataaataccgaccgagcgcaattgtgggtgaggggaatctgtgactgacattttaacagccccggactcaggtgctttcagtggctggtatcccaggtgttttcgagcccagtctccaatatcctttgcatggatgaccgggggagggtcgtcggacgccgttgatgactccttcgtatcgggcatatttggcaccgaggtcagtcctgtagccaacaccaacttatcgcagatgatggtgacgcgttgactcggcgacgtggacacactgatgtcgagcttccactctttagtgtctagacggctgatgtcgtcgacctatcgatcattcagaaaccccgcaattttagaatggattgagagtatcttaccgtccagttcaatcgtatgtgttttttcagctgccatttctcagcccattcacggagataacggttgatcttccagcccgcaatgaactgattctgtgtgtcatccccttgttcctccggaacaacgttggaaagaggcatatcactgaattcataaagtccatacgagttctgactcaacaaatttgggtaaagacgctcctcggcccaagtacctccaatatccgaggcagagtcaatcacaagaaggcgacattcggaggaggctgttggggaagtatcgatgctcttagtgaaacaggcagggatttccgtgatttcatcggtatgttcggctgtgctttcgtcgtcatatgccgcgacaagttgtagatacgtcttggctgcgatgagaccgtaaagacctaaacaagttagccaacgtccaatttagtcgtcaactgctaccaaccggctccaacgatcacgactcgttccatggctaaaatgattgaagagagagaagtcaggggagggaaaaagacggagttttaaatcccaaagtgtacaatgaaaaggtaacaatacgaagaatagctcggagctgcgaggattttgatattgttcttgtggggtcaccacaacaatgagaattccatttgaaatattgaaagtagtattttggaaatatcagacaacttgtaatggaaatatagtgaccgacatcatcttctgatggtcagctgtacctcgaacaggccgaacagcgcgattgactggcctaaccattctacacgtccagaatcaatgcccatgcttgatattgcaaagacacgcctactcacttcaggcgatgtttagatgggtcactaccaatgttgtaggagatggaagataatattcctactccataccccgtaaggatgtggtccccacgcaaatgttacatatttggtctttgtgggctgccgtaccccgtaccgctcgtgttgttgacctcgtcatctcgcgtactccatacaacatcctccgtacagcacacattattacatcgacaatatccatatcgatgtatcggcctactgttcccgagcatggagctattttcatatgaccaagccccaaaagttctatccccgatgtctgccttcgcccgtgacggggtcatgacttccgcctgtcaactatataacaccccgggttttgatgctcgctgcgggataggttgtgggatatctgcgcctcaccccagatgaagtcactcagctcaggggtctttctatctacttcactggctgttttgccttccctcccatgagctaactaggtacctgaagtcgcctgccatagtttcggttatactcgatcggagccctcggtcacatcggcaccgcctagcccggcagttgcttcacgggctaatcacatctcggccgatggtttgaaatccctgatggccggatttatggatcttttcccgcacctggcatcaagggactttgaaaaggcggggatttgctgtacaacggacattccgaccggcgatttcatctttgattcccccttggagcacaagcccttgtttattgctactagaggaagcgtgcagtaagtgaacccaagaatggacctttttcgggggatgttaactaacattctcatatccagtgcgttcaagttcctgcctgccttccgagaatacattgtgggaaccttccaactcaggctttcgcgggagttgcttgacaaatggaagttccctacgcagtcccgtgggcgtttccaggagatattcaggggagatggacgtcgtggaggaccagagcgaagggagttgactgctcaagagctcggcacatttgacccggcattgaaagattgaaagctgcttcacccaggccaggcaagatttgaagctgcgaaggacacaatccaggcaatatatcatgttataaagaggagcagttaccaattttcggagccattacataccttgaacgaaccagggcacgctaatgatatgaaaacatcagaccccttacttttcttcaaggccacgaaagacgatttgaatgatagatggcccgactttatttacctcagccagtcaggccgaggcttcattgatggattaggatatgcagtcaaggcttggaaagttggttggcaattctgatttgagaattgcttgcctgagaggacagtactaaatccgagaagtaaaaaagacccgaattgatgcgctttcttgtttcgatctccggatcattcgagagatacccggggccttctcatttttattcagatattttgtattttgtgatcaatgaggattcaaacagtctttcattcgcgagttcggagagatacgaagcttcttccatttcatggagtaaaagtgccatcagacatttccaccattaccttcacgaggggacacaaactctgcaatcaagatattcgcatttcaatacagttcctacattgtgtcctggaatgtcaaaataacgaacggctcatcggggcccattcgataaactcatgaaccgctcatgtgatcggctgaggcttatacggggaagttttataagttttataccaagatatcctgcctccagcctattcgtccaaaaacaatctgatatctatttccaagttcggtagctatcacgatctagcctgttatagaatatcaaatgttttatcttcatatgcagtacaacgtatgtaacaagccgggcaggaaacccgaccacccgagcggcgttcacccttcgcggaaattgcagccgattgtctctctgatcgtcgtggtctagtgggaaaaaaaggttagacgatcaacggcttcgcctccgctccgatcttgtgatcggtcgaaacccgtagaattcatatcctcattgggaagtatgaactcatgatcacgatggttgtcattgggatcgcgatctatattaagggactcgccttcttctgatagagtttcaagacaaacccattgcgctgcattcctccattgcagaaagacttgtcttttaaccttcgaaatgtcaacgctcaagaattacttcggacttgggggaaccgacgcccattctacccctaccgacaacaattccccggctcaccctctcccttcctcgtggtattcttcgcaggatatacatgaattggagcgacgcgccatattctgtcggaaatggcttctgatcacgcacaagttgcgtttccccaaaacaggcgactggctccgatacgacatcgccgggtacgcttttattttggtgaaagaccgagagggaaatgtcaatgctttccacaatgtctgtcggcaccgtgcattcccagtggttaccgaagagggtggtacctcccggattttctcttgtcaatatcacggatggtcctacggccttaatggcaagcttgccaaggcacccggataccaagaggtggaaggttttgacaagagcaagaacggccttcttcctatccacgtccatattgatgtcaacggttttatctgggtcaatttagatgccagcgaaaagcccgagatctcgtgggaagacgactttaaaggagtcgacctacagccacgtttcaagggtttcaacttcgaggactatgactttgataacaccggggagatcagtggagagtacaattggaagattatggcagagcactacaacgaatgctaccgtttctcaacgactcagtccgacacctcggtttccaatctcgattcatacgccgtggatgccaaatccacacccgaggagattgcaaatgggctgaagattgccagcacttactacttccccaatgctactatgaccgtctcgtgagtgtgattgtccggcaatgtaatccgattgatgctaattttgtacgcaggccacacttcttcttcatgcagcgactcgtgcctacgggccccacaacatgctcagtgcgctatgacgtttaccgcaacaagaaatttagcgacgaagagtttgaaatcatcagccaagtgtacaagcgcattatgtccgaaaaccaagatcgctgtgtcgaaacacagaagaatatcaacatgggtaaaatccagcccgcggaagagggaccggtcaacttccagactgtcgttcgtgacctgatcacacagcaccataagcgggaagaagatgccggggaacaattttggcctgcacgacaaagactccccaagggagaggcagtcagcaaagaggatatagatttctgctctaagctgagtaaggatgggtcacctttgacctcggggggttgttgtggaggaggatgtggagctggacctccatctagggcagcaacagcgccggagactatggtggtttaacgatgtgcataatagcgaatgtttcgttgattttttagctctgaattgttcttatgaagatgacatgttacatgcacaggtataaactcaaaggtcatatgaatatgtttatgatacgtaggattccaattttactataaaagagaccgattatagcagtctacaacacacttctgggtgactagcccaggccatttggatttggaagtaggtcgcaaatgccctcgtccatacaaaaactcaatattagtaaaagatagagaggagaatagcaaacgggatcatttaaccctattcagtataaaagttcaggttacatgcacatccacgcacgtagattaggtcgggggcacctatgaggcgaggggaagaggaaaaacctcccaaaagacgcccttttccccctttctccgattactccaagataatctcgttattatctcctaaacatgcccctctcttaaccttgtcatgacgatctccatctatcttatctcttaactagttatcttaactatcgtgcctatcgctccaataccccgctacatccgccccgttttctaatttccccttcaatgatgccacgagagagcgcgcgcggaaggctacgttcccacgaggcctgtcttaattgcaggtaatgcaaatacactgtctgtaagtagcgggtggtactgatctccctatagaagaaagaagacccgatgtccagccgagaaaccgtcctgctccagctgtgtccgcctgaatcagccatgcctttatactaccatacccagagggtctcgaggagggcaatctgtatgtactggcttctggctgtcggtgaccaatcattgacttttttttttgttccttacaggacgaccggctagcattcctcgaagagaaggtaaacctcatcctgagtggcagatcaacccaaacacttgcatcagaaaagtcacaggagaaggagataggaaatgcaatttcagaaacatgctatcctgccacaacacgtccaccctccattgaaccaagcacggtcagtgacccattcttcctcggttttggctacgaggactcgatctctcagccgtcatcatctgcgatcgccaaagctattgatctttactttgaatattgccatcgacagccgatctggtgttttgatcgtgaggaggtctcggacccaacttatctgtcagaggagctcgtttgttgcctactcgccttgacctcaagattctcaagagatcgtgaccatttacaacattatggagatagtgcaagaagcctagtcatgcttcggatggctaacggcacagtggagcttgaaaccattgagagtctttgtctactctcttattcgtcatttctaggtatgagcctcggctaccaagtcgagaggattccattgttaatattattctagacggagatatacacctcggtcgcttccatctcggtcttgctctacatctttgccggtcggcaacgctggatcttgaatcgagtcatggaggcgaaggtcccatggccgagcgaaagaagcgtctgttctggagtctccaatgtctggagcagtcctacggacagcaaaatgggtttctctgtatcccatcggaagtcctgcgtaccttctatgttgcctccagtagcgaccgcgcaaaacaagatgggacggaggcgaaacctccaccgctgccgacagacgatcttgggtgctcgaaaccatccgccatggggacttggagcttagcaactcattttggctgggtatggagcagagtgcggatatatgtctccgattgtgctcgaaataggctcaaagaaccctggcgaaacgattcaatgtacgccatggtgctttccgacctcacagaaattgagaacaagctttcccagtgccatcgatatgactcggtcaaattttacgagcgaacagcagaggagctgagatcgagccgaaactactggaccccatggctgaagctacagtttacttaccactgcattctaacggttctaaaccaccccttcctctacattgtggcatcacaatacaatgacaatttggcaatcccaaacgctttctggagacgctcatccgagttggtcttgttacacgctacctggcttgtccgcatgatagacatggtatccgagaagaagatgcgactgatcgatccgttcttcggacacgctgccgccattgcagctacggtgcatctatactactgctgtgccgcggatccccggctaaagtacaaatccaaggttgatttcacaaaatgccgaaggttcctgaagagttttgtgtccttttcgccagcttgtggggtcttggtcggtgtcatgaaatcaaaccgccgcttccaatgctaacaaacgcgcaggatcaaactttggacaagatgactcgaattgcttccgggtcggaaaatatcgatcatgactgggaacctgagaagattcatcttagtatacctttaatgtgggatgttcttcaaatcaactgtaaacccaagccacacgaagtatcgacgggtggtttgctacatccatcattgaccccaaccgtctctacggaagaggcggaggacagccctgcctcgactctggagattattgttgcgatgtctcccaatgtcacagttaacactgcggacggtggtcaagctgcgcacattccaccaaccaaaccgtgcatatcttccacgccagcttcttccggccctgatcttggcgagaaactcgttgcgccagctgacagtttaatgaccaataccccctggctatggacggatccctcgcaattcgttgatatggagaacactgtgggatacgcagattccgaatccgctctcggaaacattgacggattttcgacttggtgggactttggaaacttataggagtaatatgttcattgacttctactgcggcgttactgtcttcctaaggccgtaactcttgtctcaatccccgcatttatcttttgccccaaagcccctatgcaaaaaagacccttgtgcggaaacactcctaactgacccccagatcaaaaacttgatgcccacgcgtcctcgatcaagttatgccgctgcgaccgtcttcagcctttcttgcaaggcagcaaagttccgtttcatagcggtttcggtaaactgcgccccagtcaccatcggatatttcttcgagggcccctggattaaagaatccttacagggctgattgaagtaggcaatgctgtatcggtcgccaaaatagtcctcgggctcacaaggggccttgacacgatgaaaagttgacttgaaccggtcatccgaccaggacatgagtaaatcgccaatattgcacacgatctcgccagtgttggctttcaccttggtccattcgtccccaataccgaactctgtcaccacttcgcgaccgggacagatttccagcccatcctggccatccccttggaaaagtaaagtcaaaaagtcccaatcggcatgtgcccctgcgcgatgatacaccttgccgtcgggaacttccggcaaggcaaagtaatggagtagacgcatagttgtttgcgagttcggtcgtgagatgccatgatactcgatgaagaatctctcagggaatcccaggccccgtgcaaagcatcgcatcaaacattccgatacttgttggacgcgattcataaaatcaagacaggcgttccggaaaccaggcagatcgtcgtacttgagccagaggtcattcatattctcgccgaactgcaactggtatgactctttactgtcgggctgcccggtagacggtcggatttgtgagttcttttcccacccgacattgtttggattccacggtacagttgccttgacctcatccgatagatcgaagaaactttttgagatcgcaaacatggattgaatgtcttctttggagattccatgattgatcaaggtgaagaatccgacattctcggcggcatggatgagttgatcagtaatttcatcgatgcgatcttcaaagtcgtgcatcgagatacgtcgaatgactcggtcgacatatcgggtttcagatgccatgtctcttagtagtccgggaacttcgcccatgtgcacacaataaattatggaagcttttataggtcactcggtatcacgtccaatatacgtgcatgctggacggaggggggcttcgagctgataagcaagtcgagagctgtacgcggagtaggacgtcatcaataaggtatatagatgtagagaatccggacactctgcgttgatagggcaggattatggtcgaatcaattcaactcgataagacattgtcagcgccttgaaaggtcaaatcagaaaatgtacttcaggcactcggccgagttctcagcttccagggattggctcggactaaacgctgctcacggggtatcaaattatctatatgtccaatatgtccacatgtatctactaaatgccacacacgcaaaaacaatttgggcgagtgcttggtgtcaaaacagatagtgcgcaaaccttcaagatatggctctattgaaccttgcgcacttgggtcacaggtgaacgatatactcggcgaccgtgtacaatgtacaaaacaattgcaaatatgaccaccgctccgaagacaaggatagaccaattcatatccaccagagtcgggttattggtggttgggaagaaggtgaaaatgatggcaaagcaaagccaggccaatgagaaaacattgatcggcaatccaaagataccgagcgaaaatcgcgaagggggaataccacccggttggaaacggacccgaatgatggcagcaatcggcaggatgtacgtggtgaaaagtgcagcgatcatcacagatgcgacagcattgaaagccgccgtagatccgatgttgatcaagctcagtagcacggtaataatggtcgataccaacacggagaagatagggatctgggtgcgtcgattaacgtgagccaactgcttagagaacggcaaggcatcatcgcgggcaaaagcgaaggtctggcgagagactgtggcaagaataccaatggcgctgcaaacttccatgacaagaatgatagcagccacaccattagtagcagccatcgagccggttgcatgattaactgctgggaggaaggagaatccactcgccggggcgagtacatcctgcaagtctcccatcttatacagcaaggtgattagcatcacgaaacccagagcgccgttgatcaaagcggtcgaaaccatacaccacggcaccaccaaggcagcattctggacctcctcggctaagagacattagccatcgcgaaataggagagatatggcgtttgacttacacatatgtgtagcagcatccgggcccgtccaggaaaagatcggagtcagttggcccaccagacacgcgaggcccatgctcggccattcgccagcgtttgtaaactccttccagacagaatccccagaggcctgtcctggagacatgacccacatgaggacaacgacaacaacgaaaccgaagaggtgaatggcgaggatcagaccctccatgggagggagaatcttgtagccccaggtattcaccacagttccgacggcggcgatgccgatagtcagcagtgtcccatgccagcgctcaaagccatatagccaaccggagggatccgagaagttgaagactagcagtccttgaatcagagtaccgcaaaggtagcaaatactcgcaaacgcagcttgccagcctagtaccgaaagccatcctagaacgggattagcggtggagatcgtcaggttgtaattcgaggtttcggctaaccggtgagatagctcaagaatcgttggcaccttggccaggcgaattcactgacccagtgatactgtccacccgatgttggggagctggctagtcaatctccatgcgctccatgcgcaacatgcgagggggggggcggaacttacatggaggcaatctcagccatggagatcacggcggagaagaatccgacaaatgaagcaatatacacatagaccatgccggctcgtccgccatcaatcaagccgtatgtactcgtgctgcgccattctccattattcccagtgttctatcataagatcgcgcgtccaaactcacagcagaatcgactcccatgtggccatcaacgtcgttgtgaaacctaagatcgaataaaaacggaagtttctctatcgctgatcagtattgcgtccagtcctaggaaatgtacaactcaccttgaactgttgggtctttccaaggcgctgcatgtcccaatcatcctggtcggtcgcgtcgattccgacgtcctgcgacaacacgttgttggccaatgcttccttcatggcgatttagggtatagcaaatggaaaggaggaaaggcgatcagatcaaggccaaggggccccggagaaggtcataatcaaaggggggaagaactggggagggaagaaaagcgcgaaagtggagccgaagaagtctatttgctcgaggacaagtcatgctgcagatccctcatggatgaatgggctttatcttatgagtcgacttgtagatgtgaacttatagtccgtagcataaataagtaactatggcagattatcacacattgcagaatcccacattccagggatatctttctccacacaaggtcaagaaaatggagtaaatggagtatacaatatacactcgaatatgattcgatccttgcacttattaactccacagacgggaggtttcttcagcgcacaacccgctagctcatatggaacgaatgaggtgagctggagatgcattgtctatcaacgtgtacctatgagacattatcattcacaagattctagtttagacggtcgcactttactattatgttctcattttgatatctacaaagaatcgctaacggttatgattaatagaatagcatagttcaaagtacatatgttccattcatatatattcttgttgttgaatgatggttgaccgttaggtccgtttactctacatctaggtcgtgagtcaactattccaacataaccaatgcgcatgatctgttcttaaccggaagtactccgtacactcctttatattcccgacattcttccgcaatcaaattgtggttgctgtacggagtatacctaccaatataactataccctactacatataccacggcatttctaaatccgttcttcttccagttccaagataaaccccctatgttgcatgtaccgtgccaagcgcctagcatctgccgaattagatacatacccaatcggggatctagtgaatgacgaatcttggcgtcaaaatacgaaatatcatatgaattgcgtgtccttttttcatttcctccgcacgtatgttctagccttgtcttaggactaaaccgaatacagatattgagaccgacctgggggttgaaaaggaggcagagagatcggcagaagaaaagggaaaaaacggtagacttgcgattgagctccagatgactctgtatattctgaatctatttatctagttacaacatccgtggatagttcgtagaaacaaattgtcttatctgatccccaagatttgaccccaaccgccacatattaacgccacatcctcgaatacttggatgacgacgcgtggggctgatggcgttgccgttcccttcggcgcccctcggcagatattttcatcgctggttggtgcagacgcgcaattctcaatggaatttcgacccacggggagcttggcagaccatgagattcctacaagatgaaaatccgccaactcccgaatcgcccatacgcgtacgagctgagttccactgttcggatcgccaagaccgagtggttcctgcccaggactctttcggatagacggagaatcgacgtgaaaaggagagtgtcaaatataaccatgctggcccagcccctggctccgacgcaaaagactctctgtccgaatctcttgtttcgtccgggatgcgctaatgttcttgcggacttctgatagcgtgcttcgcctgagctcatggcttcgcaatgaccgtctgcatgcccgcctgcccttccgatggattgctctagttctcgccgccattgggggcttcattctattttatctatttgcgatcccacaacttctccggttccggttccgcgtcggtttaagctggtatgatctaggagctcaagggttcggtccagatcgaaattacaactccttcgatcaagagtcgcccatcgtcgaaatcactccgcctggcgcaaaatgcgatccccggtacacatttcttgcgcctcggggcgattcagttgcccatcctggtccgatgatcctggattccactggggaacttgtgtggacaaaatggaatgagggtacgacacaagacttcaaagtacagcggtacaagggcgaggactacctcacttattgggaaggagacacatccgacggtcatggacgagggtcatggtacatggtaggtcatacatacattgagctcgctcaccacaattccggttctctaatcacatcgtccaaatacagcttgattcgacctatacccaaaagtacgtggtgtctccaatcggcatgtatgacggcgacatgcacgatttccaaatcacttccaacgataccgcaatcttgataatttacgaccctatcccgatggacttgagctctatcggcggcccggggctgggatggatgtatgatggagtgttccaggaagtgaacctcgaaaccggagaactgctatttcagtggcgcgcatccgacttttaccacccgagtgatagttattatccgattggagataatggtcaggaacgggcctcggggtatgaccactcgcacatcaacagtgtggacaaggatgaccagggccggtacctggtttcgatgcgccacctccatactgttgcatgtgtagatggcatcactggcgatgtcctatggtcgctaggaggtaaacggaacaacttcgccgaggcttcggatcgagctgccaccgatttctcatggcagcacgacgctcgctggcaaggacccaaccgcctcagcttgttcaacaacgcagcctataataatgaaaacctctcggccgtgagtcgcggcttgatcgttgatctggatacagaagcgcggcaggcaacattactgcaatctttcgagcacccgcacgatatcaaggccgtttctcaagggaatctgcaagtactagacacagggaacgtgttcgtgggctggggtcactctgcagctttcactgagttctccccagagggcgatgttgtatgcgatgtgcactttggtgcctgtgctttcttcacatttggtcgtgtcgtctcctaccgggtgttcaagttcaactgggtaggtaatcctgtgacactcccggacactgcaatcacaccggagagtgtctttattagttggaacggtgcgaccgaggtagctgaatggcgagttgaggcatgggacggtgaagacctcggaaatatgaccttcacggctatcgaccaggtccctcgcgacgggttcgaaactgaaattccactgacctccaaggttgattcattcttccgcctgcgcgcaatcaactcaaacggagagagcctcggtgtaacagaaatactccagcgactaccatcgcaaggctctccccatataagcacatgggctctgggctgcattgtgtttgtggtacttggctgccttatatgcggtgtttactatgctgttcaccgtcgacttcgccagggatgtaatcccagtggcacgtatcaattggtatcatataaggatgaaaaccagggcgatgatgagtatgatcgtctaccattataggacgctggagttctagatacccgttctgcctgtacataacttggtctgcacatatttacggatagattcccatatatttgcacattccttcttcgcgccttttcttatttgttgccggcaggaatgtggtgaggatattccctcgctgttattccgaaccctgttcattcgtattgacgtcaccatatctgatatcaattcctcggcaagtgacttgaatctgcaggtcccgtggatcgtgaagcccaatagaacagggaggttgcggaggttcttcttcgcttccgctcatttcttatcaaaactcatttgccaaggctgtcaaaaacctcgggggaacgtaggggtagaggtgtgagactcgatttcgtggccgacgtgattccggatatcttgcctatctgagatggggcagtgctttaccgtttgagccgtaaatatgccaagaccggaccaccttccgactctctagatgctcatatgtagggtatgcaaatgatgtttgccaaaccgaggctcgcccgaaaatggcgcgtcgtgatggagaggactccgagaggtgcccttggcgccaagggtcacctgtgaatctgatgtttcagttgaggggggcgggtactcttggcgccgctcgcagagtcccgctcctaagccaagccgaggtctcaacgccggtcacaagaatttcccgagcagtactcaagcaccgtttccgcccctgaaaagccaccattgcttcaataccatccgattcaccttccatgatcaaatcgctggatgtatgattggcgaaagaaatgcctcttctccaccttttgtcgccaggatcaggatgataacattggatccttctcggcgaaggaacaattttggactcctgactcctcgaggtcaaggccaccgaagtgtcctaggcatgagtcaatatcgagtcatgaccttcagtcttctgtggctgaactaggaagtaggtacatgattgttgagatcaaggtatcaaggttttatgagtaccgctcaattcagagtctcttttgacgtagatggcatacctttctgtctcaccattacgttctacaattcctgtctggtcggttcgaaaccagctcattcttggctcctggccaagccctatagctatagccacattggcatttatatatctccttggctgcttctcagttattgataggggaatcaaaatctggttttgttgactacggaggagtgaaaattcagcagaacttttcactatagccatgaccaagatttggcattgccctactccgtagttcaattagatagtgaagtggatcgatccatgtacgtcgctttagccagtccacactttgtaactgaatcccatgtgcccacatagtagctttccccatgggtactcgttgtagcgaggaggtatgagttggaacccgactaacttcatttagaaacctcccagctcccagtcaagcaaccgtggtctgcttatctgcattgagggtagtactgttgccatcggaacgttgatctcatactggattaactttcgagcttcctatggacctcctgatttgacatggcgcttcccaattgctttacggtgcgttttcggcctttttcttttctaagtcgtgggccgccgaaaactggggttgtggttgcctgggtgtatagcccacgatctttcttttcgacgggaaacgcaggtgtcactcttttgtcttgttactacaatagtatactttatataattatttttgattctagggttcctttaaatggaggtaaaaaaagaaagcaatgaccgcgacttgaacgcgggacttcgagatttgcacttgggatgatgttagtattggggcgactaatcactttagaagcgaatatacatacatctcacactctaccactgagttaccactgcaggtgatgatgaaacgcaaagataataaactataatacgctaatccttaaaagaagcttatgtctttcaagctttagtcgttacaccacactcagcaactattttgttgtccataatcaacctacgggaaagcattttgcccagtttaacaacttttcactaattttgcttgacaccaactctgccttgtgacatttgccattatataaaatagagcctggccacgccactcgcaagtgggcatattactacttgacagtagtaaagacgggatttaccctccgggcatctagtgttagtacccattacctctattcctgccatagcctcactagacaggactaaggcccttcgactaagactcgccgaatttgcctaactgggagatgaaccaggtcagtcgtagaagcaagtgaattggctgataaagggattatgctattgcttgtcactttcgatattgcggccggagctgtgcccccggtacggccaagatagtggttattggcatagtccagcagccagagcttgagagtttcctcgtcattccctcacatactcgatcttgagctcttccttacaaattacaatcaacctagacatcaacctagtccacttaaacctatttttaggtccgtactacagtctgcccgactacaaactggaatgtcacctattaaacaattacatcgacgtatatacaaccctgctcccacctccacgggtgctaagatttttgttgcgtcactgtaactcgacatttgcgttgggagtggagacatcagacgggacctggggactgtcaggactaaacctaacagcgtaattcatcgtacccggcatttatgtgtagatcaaatcacgtaaaaacatcattcatttcctttgagcacccggccactcatccggtccttcggcttggggatgagagccctacgcggatgaatcatatcataggttaatcattttgagagttgcactaacaaatgcgaagttagaaagggagagagtaaagaatgatctcggtactggttagggctttgtgtcaatattagcccccttctgatgtgttgttggtaatagatagaggggtagagaggggtaattttatagacaggcctgcttcggtcactgtataaaatcattaagacgaccctcaatgaacctctcgattgatcagttaactacttgcgtaggtatatgtgtacgtaggtagccatgcttgtggaataaagaccaagtgctttgagcggcgatatgagcatcaaacgacatacatttctaccttcccatacatcatattgatctaatctaaaacttttagcttagcgctagatatcatctccagggctataagatcagtatttcttctcgtgtcaaattcgtccattccaataacaacatttccaaggcctgtgtcctgtctaaagacttctcaataaaagggccctcacataggttgtctcccccaatcgtctgccctggggaggtatttgattgagttttcccatgtgatgtgtttggatagattgccggtgggccgaagtctgatattgctttgagcgcatcgtggatccacggcacatttgagggttgatcatcacaagcgtcaacagaaattgctggtagcgctggtagttttcgaggtgtatccttgatctctggggaggcatagccttcttcacttatgtcttcgaatcgtggccgtttgagggcggatcttagttccagtcgctcgagaactccttcgccaatattcgttactcacttgacctcattgttcttttcctgccacaggtgcttcccattggtcgttgtgcgagaacctggcggcagacgggatcatccggagttttatcggtgtggtggactcggatatgtctgcaacgggtggtcaatttaatagtaagtgatcagttttgtcccgaagttttattcttttacttactaatgaagatgatatgaactgcgggttcatcgcacagacccgcgccgctcaaaccgtccagaaagcaatgaaccaggtcaacaaggctcgtgaccgattcacatcattggttaaagaaagggagggaatccaaagtgaagtctaaataggtcatggcccttgtaccagagtgggaggatatccaacaggataaaagaaatcgggaagcagctatgagattactacaaatctgagatcaatataactgaaattcgcagtgatttcatagaatcctcgctaggtagaaacagacaacccgtttagtgcatagcccgtttcatcaagcgatctgatggtctgacgttgcttccttcgccatgtgatgacttgcgtttcttgggtcccactaggtcaccgggaacctcagcttcaagcatcctgagaacttccgcgggtttctctgcttttaaagcaataacttgctcgttccttctctggttttctgggtagttttggtaagtaattacagagggcatgccagacctaggcgtgattgaaggctcaccatttccgccctttccaacctcgtgactaggtccatgctcgaaatggaaacaacccccagctatttccaaggcttgttcatctaagctgagacgatttgcgaatgattgtcgggatgcttcagggtcctttagagttttgcaggctggcaagtgtgttgacgctgaaatagaggttgaacgaccagctatgcttccaactgatgaggtatcacaactttcatcgaggaatcgctcccaccaggactctgcgatgatctcagtgtcgtcatcagaattcagttgctcggtcttaaaatagctaagttcttcttcaacgtgtatcacgacagggttggattgtgatagcggagcaggatcgtcttctatcacgatagtattggccttcgtgcctaggtccgaagaatcgatagaacccagtctgaacgcttttgagaaagttagcgtggtgaaaaaaaaatgcttctatgagatctctcaccgaaggcctcgtttgtgttgttcccggaggattccatgctgaagaagcgtttgttgatcaaagattgacttctgctctcttgttctattaagaatttcgtgcgaaacaagtggctttatagctcatgcccgatcgatcacgccttgcggattctctagcgcagacagcgaaagtcgcaaggcaggatttgattcaaacaaactctgcctgtctgtcaatcgttcccatgcgcaatgcatgaagtatgaactgccgcatacctactcatccatgtagtccaatgaacatatcgaaagatgttgttcctattcttggaagccgtaggtctgcatatttttgcgcccagaggttctaagcctaggttgatcatatcctgcttgccaatcattctgtgacctgagagataagacagtatgatcccggccttgttcgttcttccaacattctgccgttacatcttaaaggcagatttggggacccgctccgttgacaattaaccggcgaatcggtgtgtgaggcggcaggtcgcaggtcaacgcagcggactaaaggcaaaattgcctcatagtagtcgtactggagcaatcaatcatgatatgtcaggccgttcctattttcagggtgatgcatgtctgcgctgggctagagcgcagtgttcttccaccgggccgactgggtcctgcttgccagtcgttcctcgatcatagactgaagaggagacgagactagcgcactaggccggagacgagaggcagcctcgtcgtctccagtccgcgtgacgccgatgccgtaacagtagacctatttccgggtccctccatatcatcctatggaccaatcgattatgaggttgatcgatggttgcgctgataagccgaattaggtgactgggggccaagcctgcgcatatctcctgaataaccgtaagggaaacgggtgtaggtcgggggggtcgacatcttgcacgctacctaagccgtaggcgattttgtatggtggtctgcaaactgagcctagagaacatcacggtcaggtcatagatcgttcgtgtcgtaatatttggggactccgcatgcactggccgaaaggaatcgcggctaggacagttctatcggtcaaataagccaccttggtcccaagtcaatttcattttgaaaatcaagcgagagctatccctcaagtgtgtcaagaccctgccgttccgttctttgtatgctgcggtgaattcgtagccctggtccacgtaggcgattgtctaaagcgagcgaaagccgcgccgataacgggaccaacgattgaccgacagataatcacattaggacggggaattcgtgggtcagcatcagggcgtaacagaaagcacctgattaggaatgaggggacggaaagttgcgtataggttacgagtcacacagggaaaaggggggtggcggagctcaggagctcggtgatccggatcaatagcaaaaatgcctcacctgcaaggcccagggattacccgggagacaagggcgaaaagaaaaatgacctgggttatttgttgggtggtggaacaggggagtatatagaaccacgcacggggaggcatgaggacaaagagcgctaaactgcaagtggacaaactaaactataaagcgtaattcatcgcacccatccgatatggtgtagtggctaacatcgccgtctctcacacggcagccgggggttcgattccccctatcggagtttattttttcctgacataggcttccacctcccggtttataccaccggaggatttgtcacgagatcatttcatgagacggttttgcaagttctatctatcttaagaccctggcaccgggcttccattcagccttctcgagcccttttgtgatgcacgagacatgcgctctcgtgattggcccaattctttttctcttccatcccctcacttaggcacgggtctctacagcaatgtgaaagctgtcaggaacatgagggtcggttcacccattgagggaccgaatcgtgccatacaccacgttgacgctagcgagggtctggagatgctcgaagatagcatttgtggccttcgaatcaccgagaaagagcttcagacagaggcagctgaattcggcgctttgctgaaagacactacgaatcgatttgctgcattgagtgaaatgatcgaatctcccagtaagagggttctttctgtctccagattctatcgatgatagagagagactccggagaattagggcaattaataaactatctactccgtagttagtacttgcatcgggcagtgaaaaaaaaaaaaagaaagggaaaaatctggcggtgagccaggcggtcaaaatttcccatgggaggtcgcccagtacggagaacaaccttcaaaaccccaagcatcctgtcgtggggtcgtttcgctcttcttttcgcattcgacttcagtagcccgctgtcaagcgggcgtttaggcgcgcaacgttgattcctacagtctaaacagtggagatgacgtccccacatcccaaggacatcgggatgagttccccgcgcgaaaggtcgcagagtgttgcgtctctgaaaccgatagagctttcagagacagaacaaagacaaacacaaccagagactagagatcgaccacagtcgactacagaggttcaacagccaccaagcactgggtttgaccctgctgaccgtgtgttccctattcggtcggttgtttcactcgatcccaccgttacgccccaccattcgggttcagtacactcccgggacacgatatcaccaacccgagaaggggcgcgacagtactcattcattgacgaagggacatggaaccaaatgcactcgcagcgttcttccgaccacctttatcaccccgatcccgaacacgccgaacctaccatcccaaccggtattcctcgccacgaaacgcatgctatagatggaaaaacagaaatcgcgacacattctttagcatcggaagttgttcaacaccccgaaatttacgccaaacctgccccgagtgacaaccagtctggaaatgggtccaccgcgcctccatcctccaatacgcaacgcagaaacgccgaagaccatgttcatgttactgcccgcttcaaacatgtcatgacggacagtggccatgccgtcatcacaggacgagatgggggagcatttcaatattgcgaggatgagcccattcgcatacccggggcgattcagagctttggcttactgattgccctccgcgaagagtcgccaaatcagcttatagttcgcattgtgagcgagaactcggctgacttcttgggttattcgcctaaacaattgttcgagctgaaaaatttctgtgacattttgagtgaggaccaggtggacacactcttggatcacgttgactttgttcgtgatgatgcacacgacccatcaatcgacggaccggaggtttttaatatgtccatccgcacagctaatgggaagcgctgcaaattctggtgtgccacccatgtctctcagacgcaaaaggatttgattatctgcgagttcgagcgtgaggatgacgaggtgaacccattgaatgtcgcgggccttgccactccggcagtccccgcagacaccctaggcattattccaacgccagatcaactcgctgcgagcacaatcaacattagccagcctctccgcgttctcaggaatgcccgccgtaggaggggcgaggcatctccaatggaagctttcagtatcttaactcagatacaagagcagttagggcggacgaataatctagaccagctgcttaatacaactgcaggattggtcaaggaactgacaggcttccaccgagttttgatatatcagttcgatagcagctggaacggcatggttgttgccgagctagttgatcccaacactactattgatctctacaagggtcttcattttcctgcatccgatattcccgcgcaagcccgagaactatacaaaatcaacaaggtccggctcctatacgaccgcgaccaagtcacttctcgacttgtgtgtcggaccttggaggatctcgaattcccgttggacatgacgcacgcctatcttcgcgcgatgtccccaattcacgtgaaatatttggcacacatgaaagtccggtcttcaatgtcaataagcgtcaatgcgttcaacgatctttggggattgatctcctgccatagctacggaaatgccggtatgcgcgtgtcattcccaatacgcaaaatgtgccggctcctcggcgacaccgtgtctcgaaacatagagcggctttcatatgcctctcgccttcaggccagaaaactaatcaacactgtcccaaccgaggccaacccatcaggctacatcattgcatcctcggatgatcttctacaactatttgatgcagattacggtgttctgtcgattcgcgatgaaacaaaaattcttggtgacaacaataactcccaggaggtacttgcgttgctagagttccttcgcgtacggcatttggattcagtgcttgcctcacacgacatcgtcaaagattttcccgatttgtactacgctccagggttgaaggcaatatctggtctactatatgtcccgctctctactggaggtagtgacttcatcgcgttcttccgtcgtggacagttgacagaaatcaagtgggctggtaacccttacgaaattgaaaagcgaaagcaaaccgcgggatatctagaaccacgcgaaagtttcacagcatggcgggagacagttctatcgcaaagtagagagtggacagagacggacgtggagacggcggctgtcttgtgttgtaggttgtctccttgagatatcctaaatattttgcctcgattctttgaagactgacataccttgaacagtggtttacggtaaatttatcaaagtttggaggcagaaggaggccgccatgcaaacatcgcaacttactcgcctacttttggccaactctgcacacgaagttcggacccctttgaatgctatcgttaactatctagagattgctcttgagggtgctctggatgatgaaaccagagagagtttgaccaaatcccattcggcttccaaatcattaatttacgtgatcaacgatctccttgacttgacaaataccgaaaaaggccaggacctcatcaaagatgagaccttcgatctggaatcgacctttagagaggcggctgatatgctgtctggcgacgccaagcggaagaatatttcatacactgtttcagtacatcctggtattcctgagttagttctcggtgaccagcgtcgtgtgcggcaagtcctttcgaatgtgatctcaaatgccatccaacacaccaaatctggcgctgtcacgacagaaatttggcgctccaacggtcaaaccattccaggccatgtgggagtggagatgacggttgttgacacgggtgtgggcatgtcgcacgacaagttgcagaggctctttcacgaactcgaacaagtgtcgaccgatgatacctactaccccgaagaagaagaagagaacacgcagaacctaccgcaaaaacgtgtgttgggtcttggtcttgctcttgcagcaaggatcgtccataacatgcatggtcagctcggtgtcagatcagaagaagggaagggcagtcgtttcaagattatattgcacttccgattgccagagggaacaaccgtggacgaagatgcagatggaatgtcccctggtgttgccattcctgcgacgcctatgctttcagacaaggagtttacactggtttccggagcacatgaatctcgtgatgccagacgacgaagttctgaaagccttcgtagtggtgccagttcccgtagtggacacagtgggcgcagtgcgagaagtcacgccgatcgactcatcagtgccatgcaagagcctcctcttaaaaggtctactagccaagatttggatctgagacggctgaacctttcgtcgagtcctgccagcgccagcagcaataatgctcatcctcctcttgcatcaccatccgctgtaaagcgatcattgactatgcaggatccgcattcaagtctgtcttcggtcacgcataccccgccgctcatgttacagccgcttgtcagcccccctcccccaggtctggaaaatatcacggactcgggagtgccgatgggtgctctgcgaatgtcacaacattttgctagtctcggatcaccacccatcgagcccactaaagaagataactcatacttccccagagtttcatcaatcgcagaaacatcacaagctccctcctctgggccagcatcatctgccccaccaaccaccgtaccttcaacaacagactccgatcccctcagtgtccttgtcgccgaggacgatccaatcaatagcaagatcatacagaagcggttgaccaaactgggccacaccgttgagttgaccaacaatggtgaagcctgcacgattgcttttgcctcagctaccaaatattttgacgtggtgttgatggatattcaggtatattgaaaacacttctcctatctatcttcttcacggtcactaacccttcccagatgccaatacttgatggaatgagagccaccagagcgcttcgcgagtttgaatccaagacacccaaggaagcgctctccgaaaaagctatacacaatgatcgagtacctatatttgctgtgtccgcgtcattagttgaaaaggaccgcgataactatatcgatattggctttgatggctgggtcatgaaacctatcaattttgctcgtttgaatattctattgagcggtatctgcgattcatccgcccgaaaagcagccacatacacgcctgatggggaatgggaaaacggtggttggttcgacaccaagtaacgaacatttggtcgttgaacggccgtccttaaattctgcctccattctcacctttcctatcatctcttgattacccttgacccctgctcattcccaaggataggtccacacgcaaagctcagtccctctttgtccccagtctatcgtggttcgagctttttgttccgcgggcatattccttggaggtttgtgccccatttgatgatttccttctatctacatgacatttgtttatttgcttatgccggccgcggtacatgaaatgggcctgtgggattttacctggcgttccttgtgacttctatatgtaaaatatacggataccctatacgtcacatgtttgtgtttattttcatgttcttgtcatttttcactttattttcgcttttctttctatttactgttcatctcaatgtcgggatgtcatgacaactagttgtatggtcgagctacgttgaggtttccttggcgatgtaaaacgctgtcgccaagcgcaatatctgatgccagcatacagagacccactggccagaggggactagcacagatatacaacatttcgtccccagtctcaaccctatctgttccagcggtgctttcagcgcgggatgagtggtgctggtcgcataggccaagcttttcaagacgagccagcccctttgagagttgcgtttcattcattggttaatgcttgtatatgatgcaagtggtaggtgtttcctcccgtatttagaagtcgagttctcgagagctccctccgcagtctcctggagttttaagactgaccggcgagttgatggcagcgattttgatatcttgttcaaatgtgctgggacaccgcgcaacctccccaaggcctaagcccaccgtcaccataccatctagccgtttgtcatgcgagactgcttgaccacggaaatgtgctgccgtgatggagccaacttgcacatagtgtctagacgtcgcgtttctgttttctgtacaagttttacgtcgcagtatcctgtcagcatgtcggcaatagtccaagatcgattgggacataatccatatgcttgatggtgcacgtaggggtaagtaagctaccctggtgagtatttttaaccagtcagagtgtggatcttgatctgagatatagggaattaattagacccagtaagtacggagtaaattctaccttatttgcttcatttgcttcaccagtcttggaaataaatagcaaaaagaaagcaatgaccgcgacttgaacgcgggacttcgagatttgcacttaggatgatgttagtattgaggcgattagtcgctttggaagcgaagatacatacatctcacactctaccactgagttaccactgcagatgacgatggagcgcaagtataatacgctatactaggcttaccctttagatgaagctgatatactaattcccatcggatatattcattgacgacacgtaattcttacacaaggcccggggatagaggacacggcaagacttgcggaattactacgagatgctgggatcccatcggctctctggggggactttgtccgttggtatgtcgttcacagcccttagtattgatttaccgacgcatacgatattggccgtcagcttctatctgacaaatctgccccttgtctagacgacactgaaaaatagtgtgggctggctctctgtgatcgacgtcccgaggtcgcctacgtatctgcacgcctatatatgagctcccaaagactggggattcattcaacgactcgtttcatctatttatcattggatacaccgtagaccgagtgaattcagactctgcgtatcttcaattctgatttggttgattataaagcacatgaggcagactagactggaattacgtattcactttggtgcgattgagagtgcagatatatagacataaatagacgttgcagcccggctcagtataaggttacatggacaggatcctgctcatacccgcgtatcaactcgtgctatccacatcgtatcctttagctcacccgcactataagcctgactcatagcaatcagtccttccgagttagtatactcgtctcttttataaaatcgtcctatagtatgtaaatagaacagcttactcatcatataggtgccatggtctagtggtatgacgacacattgtggtacagcaatgatctgtgttagccccggttcgattccgggtggcgccattcttattttttttcttcccttttctctctcacttttaccaaatagtagaccagtcaaaaccgattttctgctgtagtgtaataatctaagagaaggaaaagccataaacctaagaatatatcagctttacttgatgtagccaaaatttgtcgccatttcatctttccggtgccatggtctagtggtatgacgacacattgtggtacagcaatgatctgtgttagccccggttcgattccgggtggcgccattcttattttttttcttcccttttctctctcacttttaccaaatagtagaccagtcaaaaccgattttctgctgtagtgtaataatctaagagaaggaaaagccataaacctaagaatatatcagctttacttgatgtagccaaaatttgtcgccatttcatctttccggtgccatggtctagtggtatgacgacacattgtggtacagcaatgatctgtgttagccccggttcgattccgggtggcgccattcttattttttttcttcccttttctctctcacttttaccaaatagtagaccagtcaaaaccgattttctgctgtagtgtaataatctaagagaaggaaaagccataaacctaagaatatatcagctttacttgatgtagccaaaatttgtcgccatttcatctttccggtgccatggtctagtggtatgacgacacattgtggtacagcaatgatctgtgttagccccggttcgattccgggtggcgccattcttattttttttcttcccttttctctctcacttttaccaaatagtagaccagtcaaaaccgattttctgctgtagtgtaataatctaagagaaggaaaagccataaacctaagaatatatcagctttacttgatgtagccaaaatttgtcgccatttcatctttccggtgccatggtctagtggtatgacgacacattgtggtacagcaatgatctgtgttagccccggttcgattccgggtggcgccattcttattttttttcttcccttttctctctcacttttaccaaatagtagaccagtcaaaaccgattttctgctgtagtgtaataatctaagagaaggaaaagccataaacctaagaatatatcagctttacttgatgtagccaaaatttgtcgccatttcatctttccggtgccatggtctagtggtatgacgacacattgtggtacagcaatgatctgtgttagccccggttcgattccgggtggcgccattctttttttttattcttttccccatgatcatagaagacagaccagggccgagtaattattaggtaaggcttcttttttgtaagcttttccaggtcgaaagtcatatattaaccagacatcatcacatcgttcactgatgattccatgcaatatacaatgttgtatagagaaatgagggggaaaggagtacggattttgatggggtatggcgggcagaactacccgtaggcggtaggagacaataagccaataagacagcccaaaacagcccgaaggcggtctgaacaccataatctttaacaaagtcctgcaaacaaattcatccatgagtgacatgaggtgatactctgtgctagtgtggaggttagaaaaaaaaattggcgccacccggaatcgaactggggctaacacagatcattgctgtaccacaatgtgtcgtcataccactagaccatggcaccggaaagatgaaatggcgacaaattttggctacatcaagtaaagctgatatattcttaggtttatggcttttccttctcttagattattacactacagcagaaaatcggttttgactggtctactatttggtaaaagtgagagagaaaagggaagaaaaaaaataagaatggcgccacccggaatcgaaccggggctaacacagatcattgctgtaccacaatgtgtcgtcataccactagaccatggcaccaagaggctgaaatttgcacaaaaattggctatatcaagaagcgcatttcatctagtttagcggcagcgaactgataggccttggctttcataagggcctcatttgcgagcccaaaggtaggatcgcgtttcattaacatggtgctgtatctgacattagcaaggcgtattgtctgcgcccgccagtggtgagcaagctgtggctccgcgaaaagaaaaaagaaaaaaacgccgtgttagctttgaagcttcataaaaagatcacatattcaaggagtaggtcacctttcagaaacttcttgtgcatagtatgtaggtgagtgccgaaaggggccttcgctgttcaggaattcacaatcggcatccaaatactagaaagggtttgaccagaatagtctcatgcaatctttgataatgatcatcgatgcaaagacacgcagaatgttgtaccgtatgttaggcgggggctgtgagaccgttctgtcgaagtcatcttgaacaacccaaccttttaagctctcaatgacatctttttttgctcttgagataagctttcacacctgcttcttctggttttgttgcaatagtatgctgcccaagattcacactgtaacgtttgatggttgagttcaagttcccattgggccaaggggagttcgggccagcattcgtaacatccgttcaggaactgtcgatcatttcggagagaacggatattagtccagcagatttcaagcgcatccttcagctcaatacatttttgttgctcttcaaatgttagagccggtttgacagagtcttcctcatcttccacccaccaaggaatctctccattctcccttttgatcattttgatcattttaatcatttttccttcttcttcttcttcttcttcttgtatgcgattccacccctaacatccatctgctgaggtttaggtcagaattcctagtcgggctttggaataaagatctcacagtcttgatgggggatttcaccaccggcttggcaacttccttcagaactcttttgtcggctttactagacatggttgaggggatttcgaaatttctggagatatggtaagaaagaagcaactgccatggaagcgtagaagctatctaaaaccgtggtgagatcaagacggtttggtttctttcaaactcgtaatgattttaaatgatacagggctgatcccggagatacttttctttgtttaaaaggggcgctggatacgccactgcaaggatatctgtttcttcccgtctgttatttgcaaaccagctcttcgctttgttcccaaatggattttcttctttcttcttttatttccggtcatagacgagatatttgagaagcactagagggtcaagagtccctttgaaagaaagcagaagtgaacaaatgggaaagtgtcatatgtcatctcggcccaatttccaacagaactactacggctccggttggtggttggattattatctatatgcctggcccaagtagatgatataatctttctgtgatttcttgaaaacatggggcgcatagatcgacgatggtagaagtcacctctttttggaattgccagataaacacatagaaagtaggtattaaaccatctagaatatcaaagaaacaaagggtttctgcggccatcatcttagaaacaggttaggtttggctcaacgaacttgtcttggaatctgatagatgaggtgggttgaaacaagcctaggtttcgcttctcacaaaatggttgattcataggtcacgacttaaatggagaattccagaaggtcactcgggtgaatccttgttgccgtattctgtcaatattctcaacatcagtgccttcggtttagatatgaaattaccaacttaatttgtagccctaccatgacagcttcctagccttaatttactctatcgacccttatagattgctctagtctttgctctaatctcctagtcatctgcatcgcggaagctaatgatctatgtcgaaggttatacatagaaaagtcttcacaatgctttttctgccgtctacctcaaaaaaaagcagtatctaaaaaagatctacatctgaaaataccacatagacagaggccgtattcaaacgagtaaatgggtactcaaatgtcattgtggggtaatttaggtataaaaacgccttccctacatcaatttcctaattagggcacgccacttgatataaatctgctggttaatcaaaatgtaacataggaccctgaaagacggcagtacggtaaaaaaagaagaattggagattggatgctgtggggtgatgacgacatataaaaaacgcactagtctggcgtgacgatcccaattaatataagtagataggaagtaccgaggctgtaatccggcaagccagtaaaagtacgccagcccgcacgagagtcactcgggtggctttgggtctttcggggtcttgaaacacgggaagctgaggaagtcactgtaaccctacgatgtatgtatacctacgatctacataaaggattccagagttggcggcattttgcgagctgatcggaaataaacagtacagcactagacaagatgaaatatataaatcatcaacatctgctgctcaaatgcataacctccccaaacccactggatcataattccacaagttcaactcccaaacgccagcatgtcgttcaagctcctgcttgccaccctcccagccctggcatttgctgcctgcaccggtcctgctgtcaacaccaacggccttgatctaatcaagagctttgaatccttccaagcaaacgtgtacgatgatggctacggcaatcccaccatcggctacggccatctctgcagcgactccacttgctcggaagtgacattctccaagccattgaccgaggatacagcgagccaattgcttgccaaagacctagtggtaagtctctacaagcactcttcctccctaaaaccccactatgtaggtatctaatgaatgtactaacccggaaaatagacctaccaaaatggcgtaacaaacgcccttgccaccgcggttactctgaacgacaaccagtacgcggcgctcgtttcgtggacgttcaacgtcggcgtcgggaacatgcagtcatccagtctagtcagccgcatgaatgccggtgagaatgtggagactgtggcatctgaggaattgcccaagtggaataaagccaatggggcggttgttgctgggctgacgcgccggcgggctgatgaagtgaagctgttcgaggaggcttctcagaccaaggctttgcctgttggctgttaagtcaggacttgaataggtagactttggctatcttttatcattggaggtagggggcgatgcattcattgttgattaatgaatgcatacatctactttcaatgaagttcgatgtttatcttcggcagctttgtttgttccttcatacttcttccggggttccaaggctgttttctcaagacatttggatctaagatgaagacacaataaaaggggagttgcgtttatattttatatggatatcttcatataacatcagttttcaagtaatttcatataacagtttcctggtctagcggttatgattttccgttaacaaatgccattagctgatgttccggaaaggttctgggttcgattcccagggaaactattttttatttttatttttagataccatgttgctaagtttaggggtgatatacggccgatttgggtctagtggcactctgaactataaagcgatccttccaaggttccaatgaggctgagcttttttccgtcctcaactcacctctgaaccatcgcaacatcctaagtcgacccatcatgtcgctacttcgaaagccgataaagcaatacccttggcttgcatggtccatgtgtaacatctatgactggctccattactctgagcccacctgggactatacaatctaccggacgacctacactccccaatctaatgccgctttcctgcgtatggtcgacctcaccacgaagtacatgaagaacggattctacggggaatacgaatcttcccttcgcgaaagatccaatgcaaatgagttcaacatcactccctaggatgaaatgtggcctaattaccagccacaggtcattgaagatacttcccagttcgatggagcatcgatcgaccagctccgcgagcatttcagggccgacgcaattaagcgtggtatactcgatgtatttcctgggtatcgtatgtttattatcattgacgaagaaagttttcacacgttacaaaacgctccccttccggagaagtcgaaatacgaagaggagagacgtcattatgtgaaactcaccgaggcgttggaggtagatctatatgaggattttccagggtggatgaagtgttccctgtcctcgttattcgaggtatggtcggatatgcaggacacggcttatatgaaggacagttattcgatgagacccgacggtactgatgttttgtgaatttttcatgtcatgtgggacttgaatactgcagtcactatacccaagattcaatagctgcatattgtcggctctgcgaccgagattgtttattgcattgaaccggtagattagatagcctgtgtactcccgaagttacatgctcctcggggtcgtcctcgtcgacgtgcacgaagggggtcctgtactagaagggaggggtcaattagtggagcgtcattaatactatataagtgctaatgctaatggaaaaggtctggttcaagtgacttattcttatcgttatactcctcaataatgtgaatatatggaaatccagaagtattcttcgagttatagtcacagatagggtgaattagtggcttatctttcccttctggtagatatcttgtgtaaacctcctttataagttagattgtatgtactgagacccgatttacaagaaggcggtaaagtggtggaacttacttctttagcctttaaaccttcggtatattaatcctatactttagctttatgtcacgattggcacttgcgggactcatactttcccgttcgggattgtaccgttggtcgttccttcctgttcgagggaactcgtttgcgcagacagtcgtaccttccttctgggataaacgaggatagggctttgcccccgaagggttataaagaccccattgttgtttaacgtttgttttcttttctttccttctacatacttgatattcgatgagcaatgcacttcttttgttagaaagaacctggcacgtcacagggcttggccaattgtattcagatgcatggtacccaaccccaactccaagtatgaaaagataataaggggatatatccacatcaggaatggatggaataagtcaatgaatgtctagaccgaaagatctgcgtaagggagccaacttcatctacagtcaatttgtgcggcggtgtttatttgtcagtgagaatctacttcataccccatatgacgtgacatattccaacgtatgaacctatagccattgccgttaaggccaacgcatcaagagtgtcgagtgaataccaagccctcaaatgtttcagcgggaatatcaaactccttccgttctaagtccgactaagtgcctgcgcgtggcaccccagaagacctccacttgccaagaataaaacctggttagtctggacgtgtagcttcttctgcgagttacattaactagcgagaaaatcggtgtcggcataggaattactcgattcggaacctatacggggtttgatatggagttgagccttgccctcacaacgactctacatgtatatcttccaatggacaggggttaatgctcagcatttactattgtcgaataaacagagattatcaattagtttagtcctacgattcctattaatagagtataatgggacagaagtgacttaattttgttaggagtttacatacgaattgtaggtaccaattgtcttcctattattatgaggttcgagactaaggcggtgtggagggcggtaagccgaatcccaaaaaatcaggcaggggggtgtcggattatccaaggggggtgtcccgttaacaatcccctaagtttatacctatattctactttgattttgtattcttggttttggttttggttttggttttgttaggtcgtaaaattcatacaagtgaccgagatatatattgtcaacatgtatgtgatctggtcattattttttcagtcttgactcttgaagctgtcattagagtcattagattggccagttaatgcattgacatcccttcaccatgctatatactcctccatctttgggggtctcgccagcgagaaccacccaatcttcccccattcaccaccacctccgcaaccattctcccacgcgcccccagaacgtgggcatatcttcctccaccctgagtaccccacgcagtggggacttcactcgtgggtatgggcggccgcggccacgacgacggcgagacttgcccgaggcactgccaaacttatgcttggcaatttggcggttgcacacggcaagctgctcgttcagctcccgttgcatttgctgcaagccgtggtaggtcaccagcagcttgtggaggtcatcgagcgctggcttgcgcttcttcctcgcctggatgggaaatgttagtttcatagaatatcgactggttcaagggaaggtcagggctcacccgcgaggaatcatgctcagctgagcgctttctcttccttatgctcgaaggctgtcttgagtcagattgtgcacgtaggtcagtggacattgggttgagactcaccaataagggctgctcgtactcactcccgctggtatccatgttgtcttgtgtgggggatacgaagagagaggtgaacatgaagagaggatacagcaatcttgtatgattttataccatgagattataggcactgcgtatttgaatagccattgtccttattgtgcaggaagatgacatagggtatcaataagggcacaacaaaaccatctctgattcaccagaaggacaatgagaattcaatagatgataataaatgataacaatctcattggagagggagattgttgcctgatatcaaattaactaaatagaaaaataaagaacaagtgatgaaaaagtgagagattcaccaaataaatcatgaatagtatagtcgagggtagcacatgagacgaaggtaatatcatgctgcttgcgcttccaagcaggtctggatattgaaagtgttcgaaacccttcgtaagagaaaggcagagagagtgtttgacgcatttcgagctctccgatcctaagctgccacaaaagaacacgatttgccatcttcacaccctctactccatgggatcttgtttactcacacctacgtcgattccatagcagccagtcgccccgagcttcttaatcagcaggcttggaatatagccaggattcttcgcatggtacatcgtctctgctattgttgtacggcgagttcagttttgcggatattcggggtttttcgaccgttgcgatgtttcactacggccataaagctccaacacaaggcgagaagaatccaccatatttctactatcagatatacacggtttttggcatcttggcaaagtcctgtgaatcgtgtattattgttgatcatgtctaaaatgatatcgctcaatgacgctcccgtataagttgtaagtctatgaaatgcagagtaaatcccaaacgctaaattttcgctgataaccccgagaagaaaaaaaagaaaaaggcagaatcatgacacatatagaacaggaaaatggtgaaaaatgcaaataactaactagaagctgaacagaccggtgcgctttttgccgtaggggtagacaaccaaagccgcgataaacagcccgactgtgataccgatcgcgacttggatcatgccgaaaccaagactggcaactgaagtttcagagagagagctggaatatgaactagtcccattattttcaaggttctgacgaacctcgtcggcgtatttgatgcccgcaatcagagagccactagaagcaaggccagaggggaccagcacaaatataccaggaagaatggcggtggcggcatggccatgccagagccgactgtacagattgcctagcacaccaatagtgaatgcaccgacggtgttggcgacttccgattgggcgccgagtttggtcgtgctgaaatagttggcgacgtacccggacaaagcgatgaaaaccatgacgggcatctgctttaattttccatggttcacaatggctaggaaaatagcgtagacagccacgaaggggaatgtgcgtgcataaaccgacccatagacatccaggcctgaacacgtagatgcagatgtcgcattgccatccattagcccgtagatcgtagtccccactgtaataccgtagcccaaaaagagggagtagataatggaatacaccatacggatcgaaccagcgatgatctggtgagattgcagctccagactgctacaaaggaccatgaatccagggagaatcagagcgatagatgactgtgccatagcggagaagcagaaaagtggttcggatttaccattgcgggtaaccatgatgctgccaaatgcgcgggcgaggaaggaagtcagaatagcagcagtaacctcaaagacgttggagtagagagttgaccgtggggcgagaacgtgctgcatcagtccaacaatgcaaccgagacagaagatgatgggcatatcgatcggtcgcgctttgaaagcgaacgggccgaccgctgcactagcaaaaccgtaaaccaggaccaagatccatttactgaatctgggcttgcgctgcataatctcgtctagttcctgagttgcctcttcgacgccgataagatcgtgaacgacattcttgtaaacgttgtgtgtatcagcaaggcgaccaaggtcgactccttgcaccatccgtacaagcttgacttcggccgtgcgtgtagtaggatcatcaaaggacatgatcatgcaaccgggcagatataagaattggcccgaaacttccaggaccctggcggtcatctgcatatactcctccagacgatgggtcggcgcaccgtatcgcataagcgcacggcacagctgcatgatataccgctgacgtgcgatgatttctgcgatatggacggtaacacggatctcatcttctagacgggtcttgcgcttgctcttcccccttttcttttgcataccgggagcggcctcaaccgcggcaggcaggctcgccgtgctgaggttcatggaggcattgaccaacgacgaggtggaccgatgggctgacttcttgtaccatttgagcttttccttgcgtggggtggcggcaccagaggccggctgagacgcagggataaggggcgagatgtaacccttcttcggggtggagatactggaagacacctgagtgtcactgtcggagtcatcggtgatgacactttccgggcgcgaagagctcccgctctgggcgacctgaagcttgagcaactgcgacagaatgccgccgccgactccactagaccgtctccgctgcgtaaaggcgctgatcaagccctcgggagttgtctgtcccgaccgctgatatgcgccccgaggtttgcgcttccgtagctgatcctgaaccgcggtcatgctgcgcaccaagcgatgagcctcggcgctagggggcggctcgataaaattctcaccactctccaatgcgtgcgctcggtcggcctcatggcgggcgcggcgggcctgcagctcctcgagtggaataccgctgtcgaagtcgtctgggttgtaagaggcattgagcggctcgccctcatccgtggggcgaccgaggcgttccgtcaagcggctagttttctgtcgcaacagatgaccggtcgctctgaaccggtcgcgggccgaggtcgcccggtccattttacctgtgaaatcatgtttctcggtttcatcaaactcgggcatatgcacattggagccgcgccgggaatgggccggggctggcggtgtgatggttccggatagcgggatttcgttgagatctgactgcggcagtaacggtcgtgacaggggatcggagtcattttcgtttcggcgaagactcatcgagcgaaagcgaaccctatgatgggatcggctcccacggcgtgtgggtggctcgatcccggcattgtattggttgacatcgacggtggcttcacgctcgaggctatgacgatcaccgggattgtcaatgattgggagagggtattctgcgtattcttcacttgggcttgggtgtgggttgatgatgcccgacatgaagggggatttgggtgagctcggtggctcggtgaaagattatccgagagctgcaagtcgtttatgcaaggcacaaggcacaacgaatgggagaaagcaagttaaaagaataatatatgaaaagatgaacggtgaccaggagagtaggattaagaagaaagaagagttttttttccttttgataaggctagaacaggatcaaatggcgaaaccaaggaattgccaatctaagaattccctcaatgcggatttcagttcgggtcttggatagttaaaatagttaaaaaagacttcaaaccagggagtctagatcttctagataatgaaatcataataatacatagacttatatgcacatcttctaccatggcctttataggctcaaccctaagtccacccgctgtttaaccctccaactgcacatccatggatatatgcacactggcatgtcccctctctcattcggcaattctagaattggaactccgtagagtacgtacaacctgcgcatcagctaggtggtgtgggtcatattgtggcgatcttgttgtgtccagtggtattgacaccgagccatccgggctaaagtgtttatgtatggttcgtgcatgttcttatatatactttatataaatgctttgtgaatgggttccttgccctttccttctgttttcgtccttatctttggcacacacctagagacttcaccccttaggccgcatttgatctgcctaaaacgtcgatcttgacccacgtcttgggtgtagtctgctacttcgcagccacctcctgagatagagtggagtgaaaaggatccaagtcccttgcaaatctgatgccattatcccctgtgatatgaatcaaaggaaagggttaatcagacagtttgaagtcagatttatagatagaaacatgacccactggaccctcgggattcacgcagaacattacgaatcgccgatagctcacggcccacgccacccggtggagtcaaaatggatggcgcaaatctgtgcggttacacatgattcaatggtttaatctagtgatcgagaccctctaccccctctatcccctctatcccctctatcccacatgctatcttgtacaacacacgcagtagctcttccaagtccccttatctcagctctgaccgctccctgttggaaaaggcccgttcttagatcttggaaataccgctgttgaggtatgctgcgcatggaagccacgctgcccaagggacgaggcaccagaatgtggtccgggctgctgtccacaattgaccagacccggcttcaataaaataaaagcaaggcagttaatgctcgatttgcatacgcagtacttggcatcccggtcaaagaaagattgcgaatcggtcgcatggtaaaagacgtatcccatcaacccatattcataaatgagagtctaggcgcaaagagccagcctagtggaaaatatcttgaagctggttatgtctcatagctttacttgcctatattccctataaagaatcacaagttgtctactccgtacaggtgttcataatcgtaaaacaatcatgaaagcccaggccaaggctatgtggcggatcctctggtgataggggttaccatgccaatgataaacacggttagcctgagcaagagcgacagaatagggcccggtgaaaatactatataaaatatagaaaaaaaaaaaatctcaattctggatgaagtcgtggagatgacctggagattccaatcgtcactggaagaagtggcaaacccccactatgcaaactaaacaaacaccaactagatgactaagcaagggcaagccctcatttagttagcatgtgacagcatgtaacatccattctttactccaccgatacaatttcgaagatgctcggtattgcaagaagcttgtttgcaagcaactgcctgttggtgagtgcggttggtaattatgactttaaaacatcggaagatgtcttcttcctgttcgagtctcgtgaagagggccaggtcaatgtctcggacgaggagaaactggtagctggatggacgaggggcgcaaagctgtaggcctgccttcagctcccccggagagggcccgggtcaggatagtagcattatgaggaacaacaaagccatcgacatagagtgataattcggagagttgcccgttatattgggaaatgtcattcgaagcttccaagtttctggcgtggatgtgctgtttgaactataaaagctcccgggggatgtgcgcgagttgtctagatggcgtcttcaattaatcattaggctataataggataaaaaatgatatagacggcgaattttctgatagcagccaaaaccaataggacctgcgttggcccacacgtttagcaatttagaaatatcggtgaacattaaccgtcggggcttttatttgagaattgtcaattagattgggtacaacaccgagtagacaatgtggagtatactgacacattcagatcgatacgtgtctgtttcacagacagctgcgccgagttcagcccgaagttgatctgtttcgcggcgagtttcagggcccctggtcgctcgtgcatattgatgaaatgaagccgaatgagttgaatcgcttttccgccgtgggttgttcgccacaaagcaagatataaaatgtcgcaggcagacatgaccatcgccatgccaagtagcagtaattcttgatgataacggcgacttttgctctgcttaatctatccatcgctacccaacacgatgcccttacgattgttgtgtctccatggctgggggacgaatcagaaggtaagctaccaacgctgctgataggggaggggtgacggcaatcctaatttgccaatagattttacagtcacaactgagtatgcaatcgcctactacagtggcgaaacacagaactctaatcaaacaggtgcgctcatgcatgagctccaacgcgacaacaccgcgaccttctctttcctcgaaggtgacgtcgattcagatcccgggcctggaattgccggttactatgacggtccgtactacagctactaccgtttcccacgcaccttttcccacgaggacagcgatgagtccgacatcctggaggcatacgagcaactgagtgaaacagttgccttggaaggtccgtttgatggggttctaggcttctcccatggcggcacattggcggctgggttcatgatccaccacgccaagatgaatccaaatgagccggcgctatttcgatgcgcaatcttcatcaattctctcccaccgttccgtatggaacctgggaagcgtcctatcgtagacaagggactggaggggtttatctctatcccctgcgtgcatatcgctggagctaaagacccactctttgaatactcaatggccctgtatcgactctgtgctggaagggattcgacatttgccgtacatgggaagggccatgatgtccccagtgatcggaagaatgtcgccataatcgccactgcaattcgaaaactatcaagtcaaattttgtgacgtcggataccaaaggcatggtctttacttcggctgtgcgacacagaggtaaagtttgggcgaagaagagtttgtttgtagaagagagtagtatatttgcggttgtggaacataacctgttgttgtaatggtatattgcagattcttcgcgaaggcagacaatgtgtttcagatcaagacattcaggacccctgaattttgtttcgccgtggagggttgcacccggatacttacctcgttgcgactggggtgaaaccttcccacacatcccgatgtagattgtcaccgagaacgaatgacactaagaaatcgagtagatagattgctttgatacaggaagcccatttacctggcctgagtagtcccctctcgcttttccctggtatgagatatatgttattagccgacatccagcaaagcaaatgcaactatgtcgtcacaaaccagcgacaaaccctccaaagcgaccgttttgcaagatgacccggcaaacttggcaatagcaattgtgggaattggcttccggggaccaggggatgccaaaaatgtcgagaagctgtgggaaatgattctcacgggtagagaggcatggagcccaattccagctgagaggtggaacagtgcagcattctatcacccggatcatgcccgccatggaacggtaagttatgcatgagatgaatccgaatacttaataacgtgagagtagatcaatgtggaagggggtcactttttgaaagatgatgtatctgtcttcgacgcgccgtttttcaacatgacaagcgacgaggcagcggtaagtacagagttgaatgttgttgggctcatctaattatcaacctaccaggccatggatccacagcagagattgctcttggaggtagcatatgaaggtcttgaaaatggtaggttattgctccgaatgacgttttcgaggctgatgatggtggatagctggcattcccctgaccaaaattatgggcacaaaaacttcctgctttgtagggtctttctctgcagactatacagatctcttacttcgggatcccgagtgtgtgcccatgtatcagtgcacaaacgccggacaatcgcgtgcaatggcggcaaacagactgtcttatttctttgatttgaaagggccctgcgtcacggtagacacggcttgttctggaagccttgtggcacttcatttggcatgccaaagcctccagacaggggactcatcaatagcgattgcagcgggagtcaatttgatcttgagtcacgaatttatgtcaacgatgagcatgatgaagtatgcaagaaattacccgcaaccgggagactagactgatttagtcacaggtttctctcctcagatggaagatgccatacctttgatgaaaaggctagtggttacgcgcgaggcgaggcagctggctgtctcatcctcaaacccctggccaaggctctacacgatcacgacaagatccgggccgtgatacgaggcacaggttccaatcaggacgggcgtactgcaggaataacgctacctaacggggcagcccaagaaagcttgatcaggagtgtctatacaagggctgatctggatccctcggaaaccgattttgtggaggctcatgggacaggcacactggctggagacccaattgagaccggggcaatcgctcgtgtctttggaactggtcgtccgcctgataatcctgtgcgaattggctccatcaaaaccaacgtcgggcacttggaaggcgcaagcggagtagcgggtgtgatcaaggcagtgctaatgttggaaaaccgcatgttcttgccaaacaggaattttgagacaattaacccgcgtatcccactcgacgattggaaactcaaggtttggatgttcgggaaagctaaagattggagactaacgtcagtaggttcaattgcgccctgagccatgggcgactacgggccctcgtcgagtttcagtgaacagcttcgggtacgggggaagcaatgcccatgttattgtcgaagatgcccaaagctgcttatcgagctggggattcaaagaatatgacataatccaatctacagcgactaaatatcataacgagacacctcctagcctgccgcgtggtttatctcgcatattcatgctctctgggtttgatgaaagaacctgtgcacagcagatgcaggctctgagcaatcatattctcgataggggacatgaagttgaccatgaaaagtttctggacgaacttgccttcacaataaacgagcgacgatctgtctttccatggaaggcagccattgtcggagatacgatggcaggtttggcagcctcactttctcagaacatcaaggctaggagcgccgtacgacagccaacccttgggtttgtctttactggacaaggcgcgcagtgggctgggatgggaaaggagctgcttcaggcctatcctgtcttcaaaaggtcgatttcgggtattgacagatttctgaatgacattggagcccctttcacagtggaaggtacacagacaccagacttctaaaggtcccgtacactgacatcatgaatgcagaggagatcacaaagtgtccccaggactcccatttgaaccatccaagtctcagccaaacagtgtgcacagccatacaaattgcgctggtcgacttgctggaatcgtggaatatacatccagactccgtaacgggtcattccagtggggagatcgccgctgcatatgctactggagcactcataatggacgatgcaatgtcattggcatactaccgaggcgttgtggcaagccagcttctgcatgaccaaccgaacagaggtgccatgatggcagttgggatgtctgccgaagagatacagccctatctggacggattccagccccgacagctggtggtagcatgcatcaacagtccatcgagtgtgacgatatcaggtgatacacttgcaattgatgcactcgcccaaaccttaaaagaacagcaggtttttagtcgacgcctcgaagtaggtgtcgcgtatcattctcctcatatagaacaggttgccgagaagtattacagcttgatagaccatatccagccccgaggactggatcagatagcgggagacaagagaggaaggtcggggtcgttcttttcctcggtcactggaacgatgattcctttggaagaattggatgctcagtattgggtgtcaaacttggttggacaagtgaaatttgccaactcgctgaggtctttgtgttttgagacaaatagtcaacgtgctgggaatacagggggttcccgaatacgaaaggctggggcagcccgaaagccttcggtggattgtctgatcgagatcggtccccacgcggcactttctgggccgatcaagcaggtcctccaggcggatgcaaaactcaatgctgccgatataacctatattagcattctgacccggaaggccaacgcagttactacagccctcagagcagtcgccacactaggatcactcaactgccccattgaatttagtgcaatcaacaggcccatggggagaagcaagagtggcacgctacagttactggttgatcttccgacatatgcctggaatcacaccaggtcatattgggcagagccacgactgagcaagatgtatcgaaaccgaacctcgccgcggatggatttacttggtgcaccagacaacatggcatgtccattcgagcctcgctggagaaattatcttcggacttcggagctcccttggcttcttgatcacaggatacaggggaacattgttttccctgccgcagggtatttggtcatggcaattgaagcatcagcacagttgagcaaagacgaagaaaagtttgcgagatacgtgctgcgagatgtggcaatacaagcagccctggtgctcaacgaaacttctggcgtcgaggttatggtgtctcttcaaaagtcgacgcaagaccaagaacagttgtacaatttccatatatactccatctcggaggataacaggtggactgagcattgcactggactggtcgggacacagaaaagtattggcgtttcaggcgacggagtcgaggaaactgatggttatgcgacggtcccgttgggaactgaaattcatggaatatcagtgattgacgtccgtgatttctatgacaagcttcaaaattctggtctggaatatgggccatgttttgcgaatatcacaaaagcacgtgtcactcaagacggaacgtgccttgcagaagtcactgtgccagatacactatctgtgatgccagcatcatttcagcatgagcttttggtccatccttgcacgctggatagtatgttccacaccatttttgctgctctacctccaggtatggggcttgaggaaggacctgcaatccctgtttcaattgaagagatgattgtatcatccagtctcagctgcccggcaggagaacccatgagtatctgtacccatgtgcgcccgatgccaaacaaggacgtgacagcatgcatagtagcagtgaattataacgcgacgcaatttgaaaccgagccaaccatttcacttcgtggcctgcgatgtgcacggctcgagcgtcatgaacccgcgtcgcagacaaaggacaaccgtacaatctatcatattgactggaaacccaatccgagttttatttccagtaagaatgcctcgtttctatttggcagggaggatgctattcaagagccagtccttcgagccgagcatgatgagagtgcagctggcttcatccgagctgcgttaggggaagtcagcacaacggaggcaatgggacttgatccttctcatcgcacattccggtgttatctccaagacgtgcttgaacgaaatgataaaccctcaatatcgttatctcacttggaaaatatcaattccgcccctatgggaaggctcctgtcggtcattggccaaaaccttgcggctattattagacaccaagttgacttttccaccgtcatcaaggacgatcgccttttggacgagttctgggatctattctcagcggacgcctcgtatcaagcagctgcaaagtatgtcagtttgattggccacggaaagccagacatctccatccttgaacttggcgttggcacaggccagatagcggagatatttctacagcatcttgtgacgctcaacgagacagcctgttgcgggaaatatacatttgcccacgaaagcgcttccgtgctggagcatacctcgaagcggctggaggcgtggtcaaaatgggttgagtgcaagcccctggatcttggcaaggatttccccaaacaaggatttgaaaaaaaattcatttgacgtcataatcctgcctcatggattgtgtactgctcgttgtgaacaatatgcactcaacaagatccgtgatcttttgagaccatctggctatttgattacaaccaatctcttcgacccaaagaagaatgtgctgaaaaatctcttgttcagtgccttgcactgcttatctgcagacgaattttgtttgggccagggtggttggacaacgagtcaatgggatgaaatcctgcaagatgcgcatttcaccgaggttgatgcctatggggaacaagactccgagaagagccatcagtttatcgttgccagaaagcgaaaagcccaaaagtcgcccagaaaggtttctattatttgcgaaaacgaaaccgaggctgccaggaatctagtcactgcgctcgagaatacttcatgtgaggtgaatgtgatacacatcgataatctggagtgtaaggatcatatttgtttggtcttggatacaccgaactcctcgctgctagcctctcccaatgaaactacattcagcaagataaaagtaatgttttcgcagagtggaggagtcctctgggtcacaaagggagggatgattgagcccgtcaacccaaccgcggctttggcggttgggtttgcaagaacagcgcgcgccgaatccggtgtcaaaccgattgtcacccttgacctggatgctcgaaatcctctctcggaatctcaagccgctgagatgatcgcaaaacttctggttgcccgatttcttcgtgaaacccctgatgaagacacggaatatgcggagagaaatgggcaagtcctgattccacgagtactagagaattcgaaggcgaacatggctatgaacggcattaatgacattgaggctgtattcgagcagcctttctatcaacttcaaaaaactctccgtctttctagaaattctaacaaccccggctttgttggtgattcgcagatgacagaactcccagtcggctacatcggaatcaaagttcaatccttcggtctgaataaatgggatattcagccagaccatcttgactgggaaacagacgacactctcggtctggagtgcagtggcatagtatacaaggtcggcgccgaggtccacggcatcactgtaggggaccgggttgcttgtcttggagctgggactgcgagaagcttttatcacgatcgggcatcagcttttcagcggatcaatgatgaaatgtcattacagctggcttcgtctttgcctctagcatataccgttgcttattatgttgtgaaccacctctcaatggttgagtcaaatgatgttgttcttgtccatgacgctggaagccacttcggccaagcacttctggaagtgtacctgcttagggatgctcgggtctttgcgacagtgaacggccccgacgaaaaggacttgctgagctcgaggttcgggatacctggggagcatgtcttcataagcgggaagggagatatagccaaggggatgttgcggtcaactgatggcaagaaagcgaatgtagtagtcacattccagagcgcagaggataaaatgctccagaattgcactgcgccatttggtcggtttattcaacttcgaacagacaacctcaagacccggctcttatcacaccctcgaaacatgtcgatgtccacaatcaatatatttgggcttcaaaaggagaggactgaccttgccaaccagatgtggtcgaaggtctctcgcttgttcctagaaggacgactcaaagggcctggctttactgatgtatatcatgtttcacatattcaagaggcaatgacggcaatcaagacccgacagcatgttgtggttcatgtggaacagagtgatcttgtgaaggtatagtttatcctaagcaccggaggacgtccatttgcctccagctaatgtgatttaggccacgctccctagggctactcagccattgttccactcagatgcgtcatatatgctcgttggtggacttggtggaattgggagggaggttgctctgtggatggcaaaaaacggagcgaagagtctcattttcgtcaatcgaagtggcctttcaaagtctcagtctcaggcaacagtgaagaatctggcggaagaaggtatccaggtaactactcgagcttgtgacatatccgacgagaccgaagtgcagcgaatgcttcaagatatctcttgtggcatgcctccaatacggggactgatccaggcagccatggtcctcaaggatgttcatattgaaaacatgatgttggacgagtatcgggatgtcatgggcccgaagtattatggcacttggaatttgcaccgacatctccctaccgatcttgacttcttcttgatgttatcgtctataagcggcgttataggaaatgccacacaggctgcctatgcggccggcagcactttcatggatgcattcgccgcttatcgaagaaatttaggtcttccaacagtatctttggatctcggaacgattacagatgttggccatttggctgaaaacagagatttagcggcaaagatggaacggcaaggattccagggaactgatacaccaactcttttatccctgatacaagttgcaatttctcagtcaactagcggagcagcacaactcgtaacgggcctcggccgatggaaagaaatggaatcacttgggaactttgatgtgcccctgtttgcccatttccggtacaagttccagggccatgacaaatctactgcgcttgacgactcgatggaaggattaaaggttgaacttgcggccgcaaaaacggtggatcaagctaccgttataatctccgacgctctcagcaggaaaattgcctcgcatctctctatccccattgaaaatatcaattcttccaatccggtctccgagtatggaattgactcccacgtggccgtggagctgcgcaactgggtatcaaggtccatggactgcactgtccccattttggagattctagcaaggtctatgttggagttgtctcataaaattgccagccaaagattcgagggcaagtcggagtgagtaggaaacctttttggtgatcgggaaatagaaatatctatatctagcttctcatccatggagatatattagcgtcgattaatcctcccgtgactttgtaaggagggaaatttggacctgagggatataatggattaaagcggcttagagtcagtctatttgacatcgaagagatcattcttgtcatagtaacctcaggtattgtccaatattcgctctaccgtgcacaccctatgttcactcccacttcagcgcatcctgtccgtcgactgcggctcgcacccttgctcaaagggagcacagtgggcccggaactcacctctactgagaaccaccgtccttcttcttctgtcacgctgacttggcggtaattcctcctcacgctttagtactatctgcctagtagatgggattatgaagtaatctcttgtattgcagagtagtaataaacaagaaacaggaaagaaacaatgtaaccaagagagagatgttacagtttggttgcacgagcccaaaacagttgcatctgcccactatgagagccgggaactggcgatagtcgatccgccagcacaaactgtgactctccacagcccgcttgttcgaagagggagaatatctgcctctgtgaaaatccatcgtgcgagatagtatgcgctgcaggatttttcggatctactagctcatgcatgtggtgatggtggtggttctccgaagaggacggagttgtctgtactccagcttgctcctcagtctcgttcgacacatcgcgcgtcgcccagtcaatgattagaagtacaccacccggtcgcagtctttcggcgagacgtttggtggccaaagcgatgtcttcgacatggtgcaatgccagacaaatagcgaccagatcgaaaccattcagctcctcctcgctgagtggaggcctagtcggtgtgattgtgggagccaggagattaccctgaacggcgaacatgcgcgactcgtcgaggcctagttctgttgcggttgcacggtaattttccagcatgccatctgacaggtcgacgccaatacatctggaaaaatgatggtatagggactagcagaacagcaactgtcagtattgcctgctgcaggtgctaaactaaggtcagtgactcacgcgagaaataatgccatttccgcaggcataatccatcaattttgtctgccgactatctgtggaagactgaacgcctatccagtccacgttgtccgtcaggaagtcgaaaatctgcgtctgtagatcttgaatccatttgtctttgaacacatgctgagaggcatggctagacacggtcagcagtcagaattatttctcccaaggtcctctccgtgcgtcttttcatgggaaatctctctatcgctttacgactcacttccaatattcttgattcttgctggctagtgtctctcccattgtgctaggtatggtcaaggtctcttgtatgaatatggtccgatatcgaagaaggaaggcgaatatggccacgactgcagctgcgcgatatctccaggtgaacattggtgaaaaggtaatgtggcactacaaggtatttatatgacccaactaacatgtgatcagatatttgatgattgaaccttccaaggtcccggggaaaaccatcgcttacaaaacatagaggaggccaggtctgtgttggaggtgtaggtcgtggacaccgattggcttatcccaacagatcaaagcatcaagcccacccggagaatatctcacggctaatcattcagctttcctccagggtccccagccatgatttgttgatggggtggagtatcttcggagtccgtcagagtctgcgactggaccgtatgtagctgaggtcattgtaataatcatgttgtctaagtatcgattactacctcaaagctaccatgagcatcagcatccttatcatcggtagaggataagccgagctgccagtcgacaccagtctcgtgcgccaactgcatcgagccatcattttcactcccggggtttatcgcaaattcctcgcaagacgcatgcacaatgtcgcctcgtgggatcacaagtcgcttgaatttcattgaggccgctagagagcgttgctatcgcggtatgacaggatccaatttgagaatgtcgacataagaaggtctaacggaccaccgaagggatgttttatgccgttgcctcgcgaaagcaggtatggacggggaagaaattagtattcgataagtccgcgatatttcccagatattacgggatagggggagtgctagcacggggagtgtaaggatcatctcatttcctttccttttcctttcatttagttttgttgtttgcatggcacggcagttttcactgtcccttattagcgttgaagaacgaggctgtggattcgctgatcgttggggttgattccaacatcatgccggcgatgtacgttgaggtcaaggcacttggctattcttgcgtacgggataaacaatgcttcaagttctccttcctgcatttcctggtcatcttctcacctcaccgagagcccgtgaagaaggatttccccctactgttacgctgatggctcaggggaaggaatagatgtattatgctatgggtcacgtgggcggtatgtccagaggggtaacacctcctccgtactgtgtaggttatcgacaacgaacacaggaaatttgagtgctaaaataattgacagacgaatattggctatttggggaacgtgatccacagtggtcaacggtgaacactttgggggttgtaataaggggatatactattaggcttcatgatcccccgatgctccaaagtccctttctatcatggatcgtctctccagcaaatctcaaacggcctctcccgagtacaagcccagataatgattatggctcagcatgtttcatgttgccatttcaaatcaaaagtcggtcagagatcaaaagttgtaagtgcatgcattaagttggtggagagacggggtaactaactatccaggctatcgagataccgtcggcatacgtcgacatagccccataccatattcttacgacatctccgtcccatccaatgaacatcatcctcggtcttcggcttttgaccacatttaattcctttaccacgcgtacggagaccgcgtcgtgccaagactccaatcggaggcacgggtgagcgaagatgccgattagtcagcggcttcggtccaaaaagcgcctccgatccattttaagttatcaattgatgactctttacggagtacaggcgctctagagcgaaatgtttgttatcacttggggctccgcacagaagtttcgacgctgcgaataaaaagcaatgtttgcttcggcctcggactttcggggctgtcttggacccctgagactctaataaaatgatggagtccccccaagtatctccatggtctgatcagcctctttcaacgcctctccccctttctcttcccaatcatcatggatgcttccgaaaaaccaccgggcacaaagtcggatgaaatccaattcgataccgatgccatgacgatcacaggcgacgagacttctggcacggagagccctagtccaaaaggcaatggctggagcatgataacgaggctccaggaggagaacgatcgcaacctggctgctggattccgaaagcaggaacttgggatcacctggcaggatctctccgtgcaggtaataagctcagaggccgctgtgaatgagactgttctctcccaattcaatattcccaccaaaatcagagagggccgacaaaagcctcctctacggaccatcctcaacaagagccatggctgcgtgaaacctggtgaaatgttgctagtgctgggccgcccaggctctggctgcacgacactgttgaaaatgcttgctaatagacgaggaggttacaaatcagtggagggcgaagttcgctttggatctatgcagcccaaagaggctaaaatgttccgaggacagattgtgatgaacactgaagaagagatcttcttcccagccctgacagttggtcaaactatggacttcgccacgcgcctcaaggtaccctttcacctgccagacggtatgactgccttagaataccaacaagcatcgaaaaagttcctccttgaatccgtcggaatctctcacaccgaggatactaaggtcggtaatgagtacgttcgtggagtgagcggtggtgaacgcaagcgagtctctatcattgaatgtatggccactcgaggctccgtcttctgctgggatcaatcgactcgtggccttgacgcctctactgcccttgaatggacgaaggctattcgagccatgaccgacacactcaatctatcaaccgtcgttaccctctaccaggctggtaacgggatttacgatctgttcgataaagtccttgtgcttgacgaaggagagcagatcttctacggcaccagggagcaagccagaccattcatggaggaagccggatttatctgccttgaaggctccaacgtcgccgattacctcactggtgtcactgtacccaccgagcgcagaattcgagatggcttcgagagccgcttcccgcgtaacgccgaggcgttgagagccgagtatgaaaaatcacctatttatactcaaatgatagcagattactcttacccggactccgagctcgcccgcgagcggactgaggagtttaagaaaggcatagctttcgaaacatccaaaaccctgcccaaaaatagccccttcaccgttggcttcgtggatcaggttaagatctgcgtgcagcgacagtaccaaatcctttggggcgacaaagctacatttatcatcaagcaggtggcaacactatgccaggcattgattgccggctctctgttctacgatgcccccgataactccggtggacttttcatcaaatccggtgcccttttcttctcccttctttacaacagcttgctcgccatgagtgaagtgaacgaatctttctttggaagacctgtgttgatcaagcacaagggtttcgcttatttccacccggccgctttctgtcttgctcaaattgctgcggacatacccgtgttgctgttccagatttccatgtttggtctggttctttacttcatggttggactcgcaatgtctgctggagcattcttctcctactggattatcgtgtttacgacgacgatggtaagtagcttccaatttgttcacatgttcttcatctaatcaacatatagactatgactgctcttttccgggccgtgggggctctattttctacatttgatggagcttccaaggtctctggtttgctgatcatgtgtactgttctgtacaccggttatatgatcccaaagcctacaatgcacccgtggctcggctggatcttctggatcgacccacttgcttatgggtttgaggctttattgagtatagaattccacgataacagcgtgattccatgcgttggaacgaatctgatccccaatggccccggctacgagaatgtccaggcacatcaagcttgtgctggcgtggctggagcgatcccaggtcagaactacgtgattggcgacaactatctagcgtcgctctcgtacagccactcgcatatctggcgtaacttgggtatcaactgggcctggtgggctttgttcgtttttgtcacgatcgtcgcaacttcgaggtggcagtcaccctccgactcaggtagcacgctggtcatcccccgtgaatatttgtacaagcatgtcagaaatcagcaaaaggacgaagaaggccagagatcagagaagcgagtttctgaaaccaaggatgagaccccaaagcttgacaaccagttaatccgcaacacgtccgtctttacatggaaggatctttcatacacagttcagacacctacgggtgaccgtgttctccttgataacgtccatggatgggtgaaacctggtatgctcggtgctttgatgggttcctctggtgccggtaagacaactctacttgatgttcttgctcagcgcaaaaccgaaggaactattcatggttctattctggttgatggtcgtccattgccgctctcgttccaacgctcagcaggctatgttgagcagttagacatccatgaacgtatggcaacggtccgggaatcattggagttctctgccctattgcgccaacctgctgccattccacgcgaagagaaacttgcttacgtggatgttatcatcgacttgctcgagctccatgatctggctgataccatgatcggtactgttgaagctggattgagcgtcgaacaacgcaagcgtgttactatcggagtcgaacttgtttccaagcctagcattctaatcttcctcgacgagcctactagcggtcttgatggccagagtgcgtacaatactgtcagattccttcgcagacttgcggatgctggccaggctgtattggtcaccgttcatcagccatctgcacagcttttcgccgagtttgatcagcttcttcttttagctaaaggaggcaagactgttttcttcggtcccattggagaaaattcacagggtatcaaggggtatttctcacgttacggagcgccttgcccgcctgaaaccaatcccgcggagcacatgattgatgttgtgtcgggtcaactgagccaaggcagagattggaacaaagtctggctggagtcacctgaacacagtgccatgctcaaggagcttgacgagatcattgaggccgctgcattgaagccgcaagttaccaccgatgatggtcgggagtttgctactagtttctgggagcagaccagtctggttttgaaacgtacctcaatggccttataccgaaattccgactacatcaacaataaattcgccctccatatctcatcaggattgtttgtgggattcagtttctggatgatcggtgactccgtctccgatcttcagagtgtgttatttttcgtcttcaatgccatctttgtcgctcccggcgtgatcaatcaactgcagccgaccttccttgaacgtcgcgatttgttcgaggcacgcgagaagaaagccaagatgtactcctggaaagcgttcactatcgccttgattctctcggagttcccatatctagttgtgtgtgctgctctcttcttcaattgttggtattggacggccggtatggcagttgaatccagtaagagtggtagcatgttcttcgtgtttttcctctacgagttcctctatactggaatcggtaagctgaccgaccatgttcatcttgaccccaactaacaaatgaacttaggccaatttgtcgctgcgtatgcaccaaacgcccagatggctgccatgataaaccctctcgtcctgggcgtaagttttctaagttctcgctcttcctgatatctcagctaacaccgcacttctcagacaatgatctccttctgtggcgtcctggttccctacgcccaaatcgtcagtttctggcgatactggatgtactggatcaacccattcaactacctcatgggcagcatgttggtctttgggctgttcgatcgcgaagtcaaatgcaaggagcaagaattcgccaagttcgatccactcaatggaaccacctgtggtgaatacctgagcgacttcatgcagaccattggcagccgtatgaatctcatcaatcccgaggccaccgaagaatgccgtgtgtgtcaatacacccgtggatccgattacctcgtcaccatcaacctgatggactacttctatggctggagggacaccggtattgtggccctgtttgtggtcagctcgtatgcgctggtcttcggtctcatgaaattgagaaccaaggcatccaagaaggcccagtgattgaggtttggaccttcagggggtgtgaattccgaattttcaaaagttcaatgtctagacttggaaaccttcttttcttcctatgcaaatacatagagagtatgtttcatttcttgttctttgcagatagctatagaatctgtgcgtctctactcatttcaaatttaaatatgcatcacttgatcttattgtttctctcattgaatttcatggggaaagccctatatgacagagaaactcataccgagacggagtctaggagttaccccggccaagccccagccaagctccagccatacggagaacgtgcgagtcctctggaaaatcaaagactggtggcagtgatcggcatatgagaatgggatgcaattcttataatacatcgctgttcagccttttgtctcgaatagacgatgctacatctttctacaaaaccgactaagatgggagtttccagccagatatcgcatatcttctctaataaacccaagtaacaaagtttcccatgcagctagactggtcacggaccttgtcggaccttgtccgagccaaggggaagaaaacgcccaagctgaagtcctgaaagtccagatttggcgaaagccatcggatcaagagtacaaggaccgatattcctcctatctctgctaatgatgatcatgcctccaccgtgggggtcacccaccgcacctttcatcgtatcattcccgaggtcatcgccaacgctgtcataccaccagatcttctcgtggaatttccgaaattggatttccccgcaaatcgagtgggccatcccccacgtttctccagaattccggattcacggggtaaatgcgatcttcagagctgtaatatgacatggcacatgccgcttctcacacataaatgagtgccggtcccgggatcttgtccccgttctatactacttacatctgatcaagcaccatggccggaactgaagatgccatcaccgaggcggagttggggatgaagatggacttgagccatgaggaagttgtccatatggcagagttgaccgaggaggagaaagttatcgagaaggcattgcgcaagcgcattgatgccctgatcatgccactggctattctggtctacctcatgaattatatcgatcggtacgttcatctcgtccatgacagttcgtcaacgctaatagaaccagcaacaattacgcagcagcaaagctccaaggtctcgaagaagatctcaaacttgacgatacaaagtaccaaaccggtctctctattctcttcgttggatatattctcatgcaagtgccttcgaacatgctcctaaactacatgggtcggccatccctgtacatcggtttcttcgtctgcgcttggggcctggtatcggcagtgacaagtcaagtctcaagctatggaggcattgtggcctgccgattcattcttggtttggtcgaagcgcccttcttctgtgccattctcttctatctgtctaaatggtataccaagaaggaattggcgtttcgaatgagtattttctactccggctccctgctgagtggcgctttcggaaatctcatcgctgcgggtattctcaacggcctcagaggccaccgaggactttccgcatggcaatggctttatattattgaagggtctatcacatgcgctatcggactggtcatttgcgtcgttctacccgactttccggagacatggaagcttttgtcccccgagatgcgcaaagttgcccagcggcgtcttgccattgaggctggccaggccgatgtggatgaagggggtggcagaagccaggttgaggggttcagactcgccatgaccgacatcaagacatatgtattcgccttggcatatatgtgcatcaccggagcggcgggtttccagaacttcttcccgacattggtcaagactctcgacttgccggaaaccatcaccctggtgctggtggcgcccccctatctcttcatggttgtatattctctttgtcactccatggcctctgatagattggagaagagattctggttcttcatctacccgatcccaatcaccatcattgggttcgttattttcatgaaaaccgattcttttggaccacgatacttctcattcttcttgatggtcttcgtcttcgcccagaatggaactctctattcctggctcgcgagctccattcctcgtccaccggccaagcgtgctgtcggtaagtcatatccccttagtgtgttctattgatcatcaaactaatcgaaacagcctttgcatttttcaactcaattggaaatagcgcttcaatttggaccccttatacgtacctcgacaaagagaaaccacactaccccatggctatgggtgtttgcattgcgctacagataattgctggtcttgcggctctcttcttatacttcaacttgcgcatgctcaacaaacgccaggagcgtatggaaaatgaggaaatgcagctttccgagaaggatattcgtcggctgcaggctactgctgatattgaggggattgatatttccgctgctagacggctgcagaagggattccgctatgtattgtagaagaattctagcagattgtaatttgatttgatattccaattagagtgttttggcttgtatatccatgaaagacgccgattattgtacgacagaggcccattgtgaccaactgtcgcaactctgaaccggacgtagcaaaggaatagagtccgagtggtatgactgtcatatcataggcagtttccagacttgtcgagggtgatgatgctatccaatcatgaattgaccgcatcaacccatatatggtcagctgacatggctctgaagtcattgatttaaatagtctgaacttcatcaccttcatctccaacatctctcccatctctactatctctgaattattcaaaatcaaatatctgaatccgactcagtacattattgcacacagtgtgacacccttcccatcactgatcgacgtaaccccacaccccacacccccaaccaccatgcaatcagcaatttcccgacccattctccgtgtcactaccaatccaactcttctccgatccctctctatcaccccgagcatcatgagtgcaggcgataccggtgctaccaagtcggagttcatgggccagtatggtggcacagtgcaaaatagatgacgtcatatctgacttttggcaggaaggactctttcgccagacgcgaggctgcacacgaagccatgtacattcgacaagttgagatggagaagtgagttacactgcatcaagttcaatatataaacttacctggtggtagacttgagaatctcaaacgaaaggtcgaggagcagcgcaagcatatgaatgaacttgacaaacatatgtggggatatcctgaattttcccactcgagaccaacactgacaggtcatagcgatgagtatactaggtcccagggaggtgaacagaactaggtttgccacttggttgcgagcatttcctgaacggatcgagttctcaagacatcgacatatgccttacaatcaactcaacattcgactaacagtgttataatgattttcaaacctcttttcacgataatttgttagctagcgctattaccacttggaatacaacatcaacttttatgcaggagattcctctctagtctcttaaatctttgtctgccacctccaccggtagctcagacaggcccatctggccatcacgaacaaaccaagtgacactatcagaacacttcccagatatgccaccatggctctcttcccgactttgtcgagcatctcaccgccgatggggatacagatcagtgttctaagttcccattagtgaggaactactactactgacgggatttgaaagacttacgcaatgctaacaatcgaatatgtcaacccgaacctgccgccaacctcgcttgccttagatatctgcccgatgcaggctggtgcaagacttaggaatgatcctgaagccaatccgaagatgaccgagaagatataaagccctattagggaatttccaaacggcagccagaccacgaacactgcgaatgcgcccagagcaatgagtgcagtctgggtgttgattctgccaaaccgatccgccacgcccccagccatcagtcgtccggccgtggatgctctatgccacactagtcagcgcttcgctcgagagaccaccaacatacattaccactcacacgttgagaacagccagaagaacgacactggtattggtagaaaacccctgcatgaccacgtaggttggataaagacctagaccagcgaaaacctcgagctcaagagctaccccaagtcagtacttgtttctattatccggattcccgattgaaagcgacccaccaaagatacccattgtcaaccaggtaaacctcgcatcttgcaaggaacgcaagttgatagttgatttacttctgccctttggaagacgtgccttgaccagagctgttccaaggacagacatcaccagtatcaacaatgccagtaatcgaattgtccacttatatccaaggttggtgaatccggctcttagcacaaacggaaatatcacaccaccaagacccgcgcccgacatcgaaatcccaatcgcaagggctgccttgcgatcgaaccattgaggcacactagctaatgccactgtgctcaagagggcagcaccggttccagaaagaacaccaagggtaagaacaaaatgccagtacagatggctttcggcgagaagaacaaggccagtcacatagcatagagtgccagctataagaatgcccctgggtccatagcgatcaaacatcggcccaacctgtacagaaacactcagaccgaagaaggtgaacagccccggaatccagccgactgcactcggcgaatagctggctagctgatgggaagcgaagtaattctgcaggattcccgtcgtgttcatcacaccgaatgtactcatcaagagaaagaatgaacctgccacaacacaccacgcttgcaaccctccatctgggaatttgtcgtcggtactatgaccggtcagatgagttgtgagtgtggatagctcggccggcggctcgactatggaaaatgccgaccggggagcttcttcgtcgaagtttgcattgtgaccagtgggataactagtgggatattccgaaacgcttgtcgcagccgactgccatggctcttgaactggattttgcacagatgcggtggcagccttttgcatgatgttatttctgggcctcgacagatgatcccgagtgatgatactgagccgagacctttggactgtaaaggaagcagcagaaatgaaaggcaatgcaccgatctcaacaagtcaacagaatattcagaacctaagccatgcgaagatgactcattgcgataaaggtttgtcttagtcttcatgatttcatggtggggtagaagtatacatcggcatccccttccgatcttgaagatggggatcctgggcgccaacaagatatatttcgcttgattattcggagacatggagctagcccgccttcaattgctccaatgaccgcagtggatgttgcatttctttgattctagcaatgatacctacgaaatatccatcggctcccttcccgacgcatggatagtgagcatccatgaaaaggggaatccatgaacaagggaaatctccgtgagagatacatatataaagatatcgctctggggatatgttcatatatgtccatatattcttctttctggagtccataggtatctcggagacaccacccgatatgtatattggcgtctacctcttcacggggaacttgtataaaatagtttctcccaattccaatcttcacaagctggcaatcgatccttcttaaacaaaaagacgatgatgtagagtgaggttgaagatcggtggcatgacacttgcgccacccaaccccccaagatgccgcgccaaatatcccgatttcctccactggcacttcacggcggagtggcatgatttgcaagtaagccaggtgacgttgtaatcatttcgtgaattgcaattgtcgactggcgagcatatatttattcttctcttcaacacatcgtccaagatctccaattcaacaactcaattgatacctccattcacaatgtccgcagcacaatgcaccaggctcatcgccagaaacatccctcaagttcggcgacaacgccaactaccaaatcctcgcgttactctggttggcagtccagccccaagtcgcaaccctaccattgactctgaagttctaccatatcgactctacgaactctcactaaagaagattcgaaaagaggcccacgctgctgagcccgatctacgccatgtcattgccggcatcacaatgcaaaaagtggtatccagtgccgtgcatgatgatcttctacaccgagtcgacctgatcgaaaatgcaaaattacctacaacactacccatcctaccgggcgccgatgagccctgggagcatgaagaagtcgcaccgaaccaaatatcaaatccgaatgcgtgggatatggaatctcttgaccaagcgctttgtgaaatggaacgcgctagcaagaaagggaatattgcaaaaattgtttgttttcagttgatcagtgagatgtaaaagtccagttcacattcataccagcttgccacgacctgttcagaagtttgagtgtcgttgaaacatttgttatagcgctatggattttgcttcattttatttatatatccccctcacttagctagcgagacataagctacatgttactgtcatataaaatttacttggaagttagcatttgaatggcgacctttctctttctccctctgaacctgttgtgctatacttcacagcggcgtaacgcgcgggcattctactggtccatatatataacttcaatcaaaggcgagttcttctttccttttgcgtaaacccacattactacttactgcctcaacgacacaccatttacccttgcagacttgagactttactactttgcagaattaccgcatccaaccatggccgaagaaatcaggttgtgtcacacctgcaataaagacaggccgaaggatgcatttcgggcatctgaaggtgcagcgaaggagttctacaaactgtgtgaggattgccgcacgaagtaccggaatgtgggtatatcatatgcctagatgggcaaataattccactcacttatcagatccagagactaaaaaaaaagcagagatcacgattcaaaagggcgcaaggaaacacgcaaggcaacaggggtcgatctcggccgtattatctcgctaagccagcaccccgaactattcccgacgtcagcaactcgcagacaggacttacctctgaaggcatcagtgctgcaccgacaaccaccgtacatggccaagcgacaggttcgcacgcagatcctagccagcacagttgggtcacagttgcaccgcccgttatcgaaagttccgcgcaaagcacaacaacaaccactgtcatcaccatttctaccaccaccaagaatatgatggaaaccaccacagagccagaggaagacaaggagaccgcacacgatggtatccagcggggagatgaagacctagagtcactttcaactgagcccgaatatgagcagcaaagtgaaatcagcgtaggtcctaaccaacgtcccgaattctttggctgtatgcactgcgagaaacttcgcccatggccaatggcgggactgcatatctgtttgttgtgtattcgggactggaagtggtgtgcaaagggtgcccacaatcatgccaaggcgagcttcttatgggatggcaaggaacacgatgagtgttatatgtgtcattttgcggacatctaatacttcttgcccatcgcggagactggatgtgtattttcacatgaagcacctatactttgagtgtatgggagctttcattcctggttttcttcttctccatgtagtatcttggtatcaacgtatacaccatttgagtagattgaaagagtgactggagattgaaatctgatagactagataaagagaaagtgacgggaatatcaaatatatctctttcggggtgtctttcttcatgtctttcgaggggttcgctaactatacacaacatacctagtcaataactggcctagagataggccaagaaatgggtacttgtgaggtttgcaacgtacttgtaggcatgcaaaagaatgagatgcatatattgagatgctaatgaaacaaaattgaaagcagaaggtctgaatgagtttggaggcgctgcacgtgacactcattaaatccatcaacctcggtgatctttaccaactctgcattcacaaaacatttacaatatcgtatagattatcctacaatttacaatcttgagcctgcaggttatgaattttgcctggccttgtctcaattcttcaatccatgacagtgtcctgccagaacttatccaccagggcaatgccaatatccaatcaaaaccactccgttcgggcccagtcagaatggcggagtcactccacctactgacctccacgcacgtatcaaaacctccggaggcgtcgactagtgtggaatctaaccagtgccaatgccatttgagagcaagcagatctcggacgagctcggactcccacatcggaaatctggctcgcctaaatcctgctgtgtcgttggctcgggatgaggaaccctccccttcatccctgagtttcccttgcccccatgatcggtggtacgcaacaatctgtccccgactcacgagtcaggaaggctccgaaccgccagtcgcggtcctgcaaagtctgccggctccggaaagtcaaggtccgtttacccccgtcatcgtgctcagatcgccccaggggtcgggacgctcccgtacccatttgatgcgtcccactggtcgtaacgcatcacgcaaggctaacgtggatcctgctgttagtgtgaccgagtcaagccctgccacgcctgctgtgcccatggctacccctccaaatgcgtgtatgagcatgttcccgacgaagaagctggccccatcagtcaggcggaagagattcggaacttacgggcggagatccgcgagctgagggggagaatagacgacaaacataatggtaaatttgcaagccccgcccactcagtcttttctctagcgtgtggcaaactcatgtggatggagaacaaatcgctgatgcctgtgcaggatctggggtccaggatctccagcgcctggaccagctcgagaacttatttgagtctattcgctctgcaccaagcccgctagtcgataatcttattcgcgatgttcggaatgcacatgtcggcctgaagaagggtttggtccctgttggaccatgggaaggcagggaaggtaagttatgtggtataacgattgctagaaagctacccgtgctgacagcctcagcgtacgaatcctacgattatccttcgcgacattcgtcactctcggttcggaatcgcgggttacttaattccccggtcgaagacttcaataatctgcgaagtgaggaagacgatgacagcgactttgaacgaatgtcacagagcagtggatctgactcgtctggcacgatatcggtcatgagcatgcaaagacccgcagtggatgtgtttgtcgagagattcgtggatgcatttagcccagaagtggatatgaaatctggacgagcgggtgcattgcgggctgcggctgggattcgaatgttctcgccactcatgacagacgcgttcgaggccgtctcggtggcattctttggtcgttctgtgcagaacaagcagatcgaggcgtccggattccgactatacccccgcgtgctacgtgcattgcaggatgcgctggtggatcctgaaaaatgcaaagcagaatcaacactggtgaccgtaactctcttgctggctttcgaggttggtttgataaaacactttttatccctagtcaatactaactacagcagagcgttgaacggactactcagagtggtgtccttgctcacgtccgaggagcagtgcgtctatttgaacatcgtggaccagaaaatcacatgtatggagttgaacatcttttgttcaccgaactccgtccatattgggtaagatcacagacctttcgtaatttcctcctctaattccaatggcttagattggcggtgctctggcagctcgacaaccctcatttctggcccgtgaagagtggaagaccattccatggtcagcaggaacgagtcaaaaagatattctgcaccatctacttgacctggctaccgaggttccgggcttactggcagtatcagatgcctttaaagaagcccaaatcacatctgtcatgggcgcacaagagatggctatcaaacagtctacgctttggaatggaatacgcgagcttacggcccgtttctatcaatggcaccaagagtgggttgtcgcataccctgacgggccaccgcaggaagccgaacaaaagggcgaccagggattcccaatcttccaacgccgcgacctccgcaccggggctactttcatcccaacaaaattcacatatccaaacctgctactcgcacaaaccatgtgtatgtactacgccgtgcgattgattctgtcctcaatcgacactcgaccagaggatcgcgtctcgcccatggaacagtatgacttgggttgcgggatctgtcgctccttggaattttatatcctcactgcgccgggcaacatgatcaatcgtcttgcattccccactcgagtagcgtgggaagcattcccagacggaggtccagagcgccattttatgattgaagtgctgcaactcgttgagaagcggcatgctcttgggctttggggcagttccatgccagagttatctaccaaagaagcctcgtcactgaatcgggtagtcagtagagtggacgcaaatactccccatagacgtgattttccgtagccacgatttaattagtctatatatataagggttgtgtggtccagctgtttcgaaataagtattgcgctgaggcgcagctgtcatttgaatgagtcccgatgcctacatgggcattgttctgcttaccattgaatagtataggggctgtgctccgcaccttccggctatattgccgcggtaataaaacatttgaacagatcacaatatatgaatctcagccgaaatgatgtatccaaagctcatttaccattctgactctgattggatgtttccgatggaactacatcgcattcgccctggctccaccagtgatcggcagcatcgaccactcacagggcgatataatcgatcaacaatcgatagttcgatggagattgaagaaaaaaaggagatctgcgtacctgtagaatcccttataaacagcatgcggcccggccccatgctagataccacacctgtcatacaaaatgccttcactcacgaagttggcgctctctgccctcgcgactaccacagtcgtcgcaacaggaatcaacgatttctcctgccaaagctcatacaacccagttgtcctcctgcatggtcttggagcgacatattatgaggatctgaactacatgcagtactggctgcaaacccaagggttttgcacatatgcccaaacctatggcgcatacgatggcttcccattgcttggcggtttgaaggcaatcaacgagagcgctcccgaaattgccgcatacatcaaggaagtcgtgcaaaagaccggcaaaagcaaagtcgacctagtcggccactccgagggtgctttccaatctctctacgtgcccaagttcgagggcgtcgcccacctggtcgacaagatcgcatctatcgcaccgcctacccatgccactacatttgccagcatttataacctcgcgtacacattcggcaatcagtcgcgcgaagtcgtggccgaagtgctcaataccgtcggctgccctgcttgcaacgatctcggccccgatggcccagccatcaaccgattgaatgacggtacccctattgcgcagcctggtaacagtgtcactatcattgcgtccaaatacgatgagctggttactccgccgtcgacatcgttcgtccacgaggaaggcgtgacgaatcgctggatccaggatacttgcccattggatcctgttggccacattggcgaggcctatgatttgaatgtctggcacttggtcaagaacgtgctgacctcgacggatgagaagttcttgtgcctgcttgggtcaccgggtaaataaaaagcttggggttgtgtggatggatcaattttactatatattactaataataactaatctttgaatgaataatacctatgttatcccatcattgttcggcttctcttgacttctatatatagtatagcggcagtggcccatagtacggactttatgactcaatttgcatggtttgtcttcagagattcagagattcataggcaattggggaatatccctctataacaagcgaaaagataccgggatgttgtgcccatactagattgaggagcacttgttgtccgggtgcatgtagccgtcgacaaccactcatctcatcaccccttcggacttccagatctgtgaagtcagagccccgaagaaacacctcagattgccatacatcactttattcgatctgaaacgattgctgccttaggcaccgtgagtttcttcacggactcggaactttctttctccgcacactatcttatctgcaacgcgcaaggattaaaaaaaaaccaccatgtcagagccagacaagaaacctggctctgaatccaccattcatcgaattcaagagcgatgggacagtctgaatgagatgttcgaaaacaccgacactaagcctgcagagccgacaggctctgccgatgatctcgaggcggaaatccgtcaagcccaagctcaattatcccgactgaagaagcagcgagagctcattgatatcaaacaaaaggttgcagaggaggagagagaattggaattggctcgcactcgactcctggccgcgaccaccttggaacttcccccggccacccctgcttcgactccatccagagccgattcgaagcagaacaacaaggctggtattgatggaggccaaaagaaggttcttgctgcccgatcggagcagattaccgccccagctcctgtgactgaagctgctgatcgtcgtccgtccgaggctaagccgtccgaaccgaagcctatgtccaaacccgtaaacctctcctccggtttgaaccttgagcaattgcgagccctcgccgcagctaccaggtcccccgccgcccaaacggttgtcaagtctgaatcccgtttcagtctgcaaccgtccgcccgatcttttcatcctgaatcatccgtccacgccccaccggtgcccaatgtgccggtatacaacggacgagctctgggagagttcaagaacttctctatgggtctagagcgacacttcgataaatatccggactggtataaggtcgatgagcgcaaggtcacgcgggcgcttaagcacgttgcccttaatatcgaggatgagtggaagcgacacatacgtcacctaccggccgaaaaggtcacctacggcaatttctgtaccttccttattcaccagctccagagcggagtgtacccggatgtcgctaggtcgcgctatatggatagctatcagcgaccggcccagtcggtgactgatttctccaactggatgcagcagtgggtgccgcatttccccaataacgactcggaacgtgaccgcatgcgccatctctttgaacatctgatgaacagggttcgcaacgaggctgataagactcatctggatttcgataactattacgagtttgtcgaatacctccagcgggtggaggattccatcggcagccgcgctgagtctcttggtcgccgggctatcaaccctcgaaagcgacctcgcagccacgactaagcggttcgacctagttgagcgagctccgacgaagctgacatcaactttattttacatctgcacacggggatagatcggaggtgggtggttttcttgctattcaatggggatttgccgtgcaatcttcttgcctttttccgtgtacataccggggcgttgcgaaatctttcaagcaaggtattcgtaacggctgtatcttcattcttcatcatctgaactatctctccgacgtctgtgatcactgcgaatctttcccagtttaacactagatcatctaaagcatacccgcaattctcctggcccgggctctcgccagcgcttcctcgatctgctccttgctcgccctgatagaacgcttcgtccatccattctcttttgtccaaccactagacttctcccctgcattcggctgatccccccagagacccttgtattcctcctcggtgaaatacaacgcctgtcgctcatggaaataagccaagatggtggcgctcgcctcgccgctgcagcaggggcagtaattgggatccccatgagggacgggaggtgccacggtcccatcacggagtcccttattcagcatcctgtagctggtgccgtagatttcgtagatcaggtcatcctgggaaacgtggacaaggcgcactttgaggggcgcgcggtcatcgtgacattgcgatccgagcttcagccagagggtgccgatgtcgttcaggttgccgatcccttcaaagtcagggtgttggacgaagtagccgtattcctgagggacaacgcttgtgagacctggcattaggtcggcgatctcttgaatggctacggccagagagaaggtgtggaggcggtcgatgtaaacttggaatttggagcccatggtgtatgattcaagaattcagaagccgagaggatgtttctttccccttcccttcatgttaatgagactcttgtttgcttgccatttgctgaagccacgtactctttctgtactaccgaatcaaatgggttgcaggtgggaatagaagttgagagggacatggatggtggcagttgcctaatcccccacggactaaggttctccccttccacgacttcggcttcagaatctcatgtgaatagtctctctgtactccaatctccaatatttgtcctatattactttgcagtccgattggagcccttcacagcatatcctggaatatgtttggctactggacccaggaaatatgcaggtgtgctgacccatgagcgtgctcttattgctcagcacttatctttttcatctgaacgaatcgtttttcaggaaacccccaatagaatcacgagaatcacgaggtatacggatgatcgaggtgtttatagggggaaacccccccacttggcgggaccggcgggaatcgaaaagccatcttatctgattcccgactttctctttttatattcttagccccggggcttctggacttcgcaactctttgagagtctatccttgctcttgggaattgcgctctggtctggatttgtgttttggctgtttggcgtgatggacgtgaaatccgtgcctttaccgcctggtcaggtacgccaggtacgccaggcacgccagccacctcatcgatatgctcggtggggattgcccctggctgctgcggtattgattcttttagcctggcctgtcccattaccttcgtggaacgtggttgagccttttgttccagtcacctgggacgaaattgttccttcgcaatcgctggagtaccacaactgcggtgatgagttccaatgcgcgcgactggaagtgcctatggattaccagaggacagatggaaaaggtcgcaccttcgccctggctgttgtccgactgccagccaaggttccagtcacagatccgcggtatggaggcgcagttctgatcaatcccggtaagttgttttggactcgatatgacgatataagcttataacctaggtggaccgggtggaccgggaacaatgcaagcgttcgtggcaggtcgaaatctccagctaattgttgatgcggaggccgacccaacagaaaccggagaagagactggcaacaaatattttgatatcatcggatttgatcctcgcggagtaggatctacaacacctccagtgatgtgtttccctgatcccgtatcccaaaggaactgggagctgcaagtctctgcggaaggcatactgggaagtggatcggattccttgcagagaaattggcagcggaccgaagcgctgaactcgggttgttctgtattcgatatgtcgagtccaggaacagacgagccaatgatgtcctatgtcaatacgccgctcgtcgcacaggacatgctgaccatcatcgaacgtcatggagaatggcgtgagaaggaaggacaacgagcgcagacagctcacaataagtgccatgggctggatgaaggagacacaatcttggaacgcactcaatggcgtcgcggagaagagccattgctttattggggtcgctcatacggtaccctgctgggaactacctttgcctcgctcttcccagagcgagtcacacgagctgttctcgatggcgtagtcgacatggtgaagtactaccaaggaacaggaccgaacgttatttccgacgcagatgccatctttgatcgatttgcccagtactgtaatgaagctggacccgtgggatgtcccttctatatggagggtggtccagactccatcaaggcagcatactgggaacttgaacggcagatcctcaacacctcaatccctgtcatggcatctgcagaacggggaccagaagttgtgacttggacagatatcaaagagatccagcgccttgccatctaccagccactccttaccttccctttcctggcagaaagaatgactgagttgggcaaagggaatgccgttcccatggctgacttcaagcatggtaggcacttcggtgcatgcccttccaacaaatgcagtcttgctggaccttggtcgccagaatgtgctacatcgcaggataacgtgatctacgctatggctgctattatgtgctcggatgccgaatatttgacaactatgaacactgagcagttccaagcgcaatggtctagtcttctggctgacagtgcagctctgggtgattattgggcgcaattgcaactgagctgtgttggatggaaagccaaggctaagtatccttttgcaggtatgtcctatcgtggtctctatttcttcgcagctgaccggcttagggccgtggggcgcctctaccgcttatccgatgctatttgtatcaaatactctggatcccgtgactcctctccacaggtatatactcgctcgtcgctagtggctttccaagctaacttgcccagtgcccagcacatgtccgagattttcccaggatctggattgctccagcaagaatcagaaggagtgagttatagttactcgcggtaatcccatgattcatccctgacatacttgatctagcacacaacactcacagccccatcaatctgcgtggcgaaggctattcgccattacttccaaactggcacactgccagtggtaggaactttgtgccaagccgacctgaagccattgcttggatctccgcatcgtcacgacacgatcagccaaagctttagcccagccgaccgtaagctgtttgaggcattgatggcggaggttcagcgggcgcctctgtttcctctttaaagtcccacaaactagatggaccgcgtaaccaagggttctatccaaccctgaagctaactatcacgatttgatgcattaatgatccagtgctatactagagtttagcgatttgacttggatgtgtttgcagttttatattagctattcttattttccttatcttactcagaatgtactgtttaatctatgccaactacccccaagtatcacaatatcacaccggagtaacgtccgcttgcggagaaacacaacctcggctcaccagccaatccaacatcgttgataatcagcaaccccgcttcgaggggttgcccggcattaagagttgttgaatgactctggaggcagattgtatttattccagtgtatctcgaccctcctcaatacagacgactaacagccatggctcccccaactgccaccgagaccctcgcaaacaccatcagcatgcaggcaccacagtcgtctcaggcggcgggtgccgaaaaggccaagatcaagatgcagatgcccagcatgcctattttcgaggataagatgaaggaacgggaatatttaaagggtcgcctagcagcagcattcagaatcttcggcgataagggatacgatgagggtatgaacggtcctacagcgaaatatcgagttaacaactaaaattcccattaggcgtcgctggacacatcaccttgcgcgatccggtggatccgacaaccttctgggtgaatcccttcggcacagcattcaagctgatgaaggcatcagacttaatccaggtcaaccacgagggaaaggtcattgcaggaggagagaatcggttcctgaatgccgctgcatttatgatccattccgctatccatgaagcacgaccggatgtgaattgcgctgcgcacagtcatagtatctatggacgagcgttttgctcgctgggccgaccgctcgatatcatttcacaggattcctgtgctttccataatgtatgttgtttccgatactcgccttgggaggccccagctaacacaatcaggacttggctctctactcatccttcaaaggtgttgtgctagcagaagaagaaggccagaacattgccaaagctctgggcaacaaaaaggcagccctgctacaaaaccacggcctcctaacggttggtaacaccatcgaggaaactgtgttctggttcgtgagcctggaaaaatgctgctacgctcaactgctagcggacgcagcagccaccggacgaggcggccaaacagtgaaaattgacgaagtcgatgctgcgttcacttacaaaacagtggggaccccgaaggctggctggttcagtgcgaagcccctgtttgatgtgatccacgccgaaactaagggtgaatacttggaatgagatatccacccgaataaattgccggggagattaatattttgtacgtgaattgcaacacgaaacagcgtttgtgtctttattcctaggatcttctctcctatttgttgtagtctacctcgaatactggctattgtcctgctgtcactacaaataggtaggtcccgtcaggcaaatagaaactccatatgcggggcttcggacttgactggcatatttgacagaaattaatgcgtcaatgaggatgtctcatgcattgcagttgactgtgttcaccaatcagcctggtgttaaccttgttttaaggtgaaacattcaaccccgaagagccccggaaggcgctccgcttttagttaattccaccactccaacagcagagatggtttatgtcttgtcggaggagactataaatccaggaagtgttcatgccaatatgaacccaaaccaatcattcttctattttcaagatcccccaggtgcagtgacgcttagcgactcggacaagtacacgtgcaatcttccagctcgtaattatcacaatgcactttaccataacttttctcgctgccgccggccttgccagtgcagggctactggagaccgtcgtcaagagagatgactactggggtggcagtgtctcgctcggtccatccaagtcgaccattatcaatgccgtcacgacgttaatccccggagctgccccagaaactcagaacggcgagttattcctatggcctggggtgagttcccaattttccaaagggttctcttggatcactgagaattatagatgtccaacggaaccggtgacctggtccagaccaccctcgaaagttggcccagcaacgcatggtgcggagcaaccaccggccagtggtgtgtgcgcgccagtgtttttggcagcttcggtcagcttgatggcaccggatcccccgtgagcggaaccgacgaggtgcggattgagtacaatcttgagtccgatggacaaacctggaagcagtaaggatgaattcaatggctagatacgtcaccactgacatttatttgcaggactgttacaaatggccagactggtgcccttctttcaacttactcccacgaatctggaccctacatgcgagggtaagtcaatggcccgaatagtatttatcggggctatactgaccccagttagatatggcaccggaactgagtgtgacgacaactgctcaggaaccatcgcggcgcagaaatacttgaacacggttattactttggcctcggctgatactacctttggctcgacgattgctagcgcgggtggtgccacttatactggactttcatccagtcagggtgggaaggtgtggactatcacgcagattgacattccctcaatggattgagaggctgaggaatttgcatagagcctagtatgctttgatccaaaagagataggttcagctgggcgctgggatggagagtcaagggatgagattatgttgcatgacgcagaggcacaatacatgcaagagcaggcgatatgcgatcaggatagtgtagagtatctctcgcgtgctaattgattggggagagcatctgaagcacccatcgggcttgtgattgggccctctgggaagactcggcgtgagaattcgagaaaatggaatttcagctgtacttttttcatataaagaatagcctggagaaaaccaatcatttgacgaattcatcgcttctataatggctatctcataacatgcctgcgtatatacacttcgtcgcccatactcacccccgataatcaagcagcactttcagccgcacaggaccaggggacgctgcaccaccaataccatccaggtgctttttcgactggacataagcatcaacaaccttcttagcatcgggcgtgataatcgagcatcccttcccattagcctgacagatggacatgccatgcacaggttgattcgaaatctgcgcctgaatagccgaaacatcccatcccgaccagccattattctccccgtcgccaaacccaaactcgccccaggtacatgagtatccaccccattgatccgtgggtagatgatcaccaggcgcagcaccccaggcgccctcagagtcctcgtcaaatgcaacatagcgagtctcaccgggcgcaatagtaaatgtcagagcagagtggccataccatccggtcagcttaccgtcaggcccgaccttgttccacacaaccactgtccagggctcgccgtttggacccgtgaactgcgccacgtatttgtaggcgtgtgcctcggtcggactgatattgatgatgttgcttccccaggggttgccaacattcccctggtaaaggatctcggttccttcgccttttgggagagtacgtcctccgaatccgtttgttgaaaattggccgttgggtggggttgcggtccagttcactgcagtcggattgtctggctttgggcccgggaggatctggttcactactgggacaccggggaggatttcacttggcagatctaaaaccgcgttgatgggtccgttgtttttgtgtgatggtggagatggtcgcttggcggggacggctttctcttcttctaacgagccctttggtaatgtttctgcaaggagcgttgctttttctgcctttgaaggattgtcgggcagtgtatctctaagtggggaagggctggctcctgggtagacggtgacctttacggtattcgttgctgttttggtgattgtgtgtgtcttgaagatggtagtggtctcctctggctctgttggcctgggagccggggtatttggctgagtgaattgaagttgagcggatctggtgtttgtcggagcagggagaacaggctcaggcttcggttcaccttgatgccaatgctcctcgtatgcctctggacgcgcgaggccatgcacaggatgatcagtcatatatgatgcagcctcgggcctgtttctgacaagtgtgagagtgctgtgaatcgtgttggttggcgcgcagtttccaaaaacggtggtcgtggtcgtgatggtaatagattccaccacaaaatcatctagactggtattcacattctcccaagccatgtttcgcggctccaagtcttcaacaggcggcatcaagcgccgagggtgatggcgatgtccatgtgcaggatggtggatgccagcaaagacatacccgacgaagcctgcaagaaggacgtgaatagacacacgccccatagcaaaatacaaagattaattggcaatagctccggagtggattaggtagttgataattaacgcgatagatcaaggcgtcaatggggttatattccaaaaaaataagagtcgcgctcagttgatcgaatgcatgtcgatggcgcggtgttggcggttgtagttgttgtcaagcaaacacgcgatctggggacaagacttcgctttataaagccctttggaaaagggaaagacctggactgtgtatctggaatgccatcacgcgcttggcctttgaagggcttgaaggggacagtagcagccctgaattccggggttccttggccggcccttgggcattttcgagcaattcaatgagcgttaatgtgatggtataagataagatatttcctagacagcgcgaagagatcaataagaataggagtacctcttgggaaagtaatgttcgatgcgtcgacgttgacgttcaaccgaagtacaagatgccaatttagcccctcgcgtcgcattccggccctgaatcacattcgtccctcctatttcacgcgtaaaagagaatttaagggtattcaataaggacgtaactcattctatttaagcggtcgatattgagtctgtggataaatgacaatatatatttcaatgagtgtatagagaagtgctagaaaggagtgtatatcaacagaatataatggacaaattcttccaacaaaattcagaaaagcatacagtgaaaacataccaaccagcaaatactaccgagtgcctatttttctgctttctttattttcctttcaacgcaagacttacaatgccacttcttgtcccccttccggagagaccatcatgcgcaggaacccgaaacctgggtttgtggaggtccgacatcgaccaactgggtaccagcaacagtagtcacgctgtggtcaatgccgttgaaaacgcaagtagcgccctcggtggtggtttgaatgtgggaaatgctcagagggtttactacagtaattagtgtcttcggttgtttatagcggaatatatagatagacgtaccgatttgaatccattcaccattggatgggaaactctgggtaaactgagcatcggcagctccaatgaaagtgacatgcacttgatcaccatcggggtgatcagtggaaggaggtacaggggatgtacccgatccctggacctggcaagacgcagtaatctgggtctgtggagggccaacatccaccaattcggctccgttgacgattgtcacgctttgatcaatgccgtcaaaggtacactggaccccggcagtgttggatgagatgtgcgagatgctcaatgggttttctaaacaaagttagaatacttttagtccagcgcatgattaacaaggggcataccaatcgagacagtggacccgtcagtagagatgctttgagtgaactgggcgttggcggcgccaatgaaggtgatctcaacttgatgatctctttgtttcactggaatcgcactagcagtagccgcataggcaacaaagagactgaagattgtagaggccttcatttttggacaaaagataattggaagattcaagattgttgagtgggtagttagtagattgttctggctgtgttcacacagatgagcaatgagataccgaagcgctttatatacctttttctctatacctactagacctccaagacaagcctgcagcatgataataacactggtttctaatattagatgatatgtatattcttttccatggtagaccggatagtggcgttaggatgtctaccatctagggcatagccactatgtcggtatacggagagaactttgaaatggaacaccccagatgactgtttcagatgatccaaggtcctcatttttattctcgtataactagtagagtgcagttgaagtccgggaatacaagttgagagtgatttgcatatttatttggtgatatgagtcaaatactcgatgattcattgctcggtgcatgatttacttaattactatataatatgtagttattcagacatgtccttcgaattattgaaagacacagtcaaggcgtcatctatactatataaatggccagttcctggtccgagagaccctgtgaccacccaccccatccccggatttttggattctcaaacatccacctgattgtgtctcagattataagcatctcacgtcttgtttttagttgtttttcttcgcgttttggcaatttccgcccggggcaatgatatttgagttgggtatgtcattgaccctcctttaccttcgtattcttgctgtttctgggttcaatgtgctatatataacctcacccaaccttatgcggagttacgcttgccactgatccgtgatatccttattttttggctactatactgaaaagttatgtctacaacatataagaggtagaagtgggagacaacaaatattcaaccaaccccacaatctaatccaccaatcacgacactccgtccagcttatcaagaatccaatacgcgctaaaccctttctagcaaaagatgcgccgtgtaaccaactggccaatcagatcgccaccggcgcgaaagatttacccaaaagggaaaccaagggggcctcttgcgaatataaatgcatggcgatacccatctttgcagaaaatatcctcccttgaacattatcaagaatggcgagccttcacccttttgacccaatcacaccaggggagatccagttggcggtctccgtcctggaatcagctttccccggtgtcaagctgcgctacaaacgcatcgatcttcaagaacccgccaagaatgaggttgttccattcctcgaggctgagcgccgaggtgaagtgcgcccgctaaagccggcacgtttgctgatggtgctcttccatcgattggacaatgggtctttcttcaaggctctgatcaacgcagacaccaagtccatcgtgtcagcgaaagagctgcccaaggacatccagggtccactggacattgatgaaatgatggaaatcgaggagctctgtctcagccatccagctgtcaaggctgagattgaaaagttgaagcttccggctggccacaccgtctgcttggatccgtggatctatggcaccgaggatgccaaagagactcggcgcttgttccagtgctacatgtacattgtggccaccgaccatccccaaaacaaccagtattcgctgccttgcaaattttctccggtgtttgatggtatcactcgcgaattggtccgtatcgattatctgccaggcggagccgatacccaaagcacagagacgcagccctggaagcaggtgcctactgtgcaatacgcgcatgacttgctggatgagcctctgcgcaccgatctgaagccctacattgttcagcaaccagaaggggcgtccttcaatgttgttgggaatgccgtgtcatggcaaaagtggcgattcagagtgggcttcaacaaccgagagggtttggtgctgcataatgtgacctatgatggtcgcaacaccttctaccgtctgtccttctctgagatgacagtcccctacgccggtatgttctaatactctccttgtattagccccatctaatttattctagatccccgtgccccctaccaccgaaagcaagcctttgatgtcggtgacgtcggcttcggtatcacggctaaccaactgagcctcggctgtgactgtctcggtcacatcaaatatttcgatggatatcgcacggatgcccagggagcaccggttcaactaaagaatgtcatttgcatgcacgagcaggataatggcttacaacacaaacataccaattaccgcactggtgcagcgactgtcgtccgtaaccgccagctcgtggttcagatgatctgcaccgtggcgaactacgaatacatcttcgctttcatcctcgaccaagcagccaatattgagctcgaggtgcgtgcaaccggtattctctcaacggtggccttcgaaaatgagaacggccaaaccgtgccatggggcacgaacgtcggaccaggcgttatggcccccttccaccaacacatgttctccctccgcatcgaccctgctatagacggctatcaaaacacagtttactacgaagacagcgtgcccatgcccgatgatgataataacccatggctcgtcgggtacaccacagaacagaacgtgattaagaccagcggcagtgcatcaaccagcgtcgaccgccatcgcgtctttaagattcggaacgactcgaaaatcaaccccatcacccaccaccccatcgcatacaagctgcaaaccatgccaagtcagatgcttctcgcacacccgaactcatttggctcgaagcgcgcccgcttcgcgacccgtcctatctgggttactaaataccaagatgacgagctgttcgccgccggcgagtttacaaaccagagcaagaagtcggaaggcgtggaagtgtgggctggacggaatgacgcagtcgaaaacgaagaccttgttctctggcacagtatgaaatcccatctaacatttcctgaaatggcagctaactgttcccagcattcggtctcactcacaacccccgtatcgaggacttccctgttatgcccatggagcgtgtcagtgtgatgctcaagccggatggtttcttcactaagaatcctgcactggatgtgccggcttcgaatcagtctttcaaccagtcgactttgcatcccgagccggcatgctgtgcgggttctcaggaacggggacaggtcaagctgtagataatatatgatagagggtgcgacctctgtaaataaatgcccccgcatagaagcgaatataacgaatttattccaatccaatgcacgctttgcagtcctttgtagtgcttctttgtggtgttgcttgtcgctgccgctcatccgcaatctagattatctggtgaggccagccgggctcaaagcaacgatatccccattgctgaagatgcctgtcttcaaggtgttggccgaagcaggaaagtcctatgtaggacctgccttccttcttgcatacagtacaccaaaatgcctcaaagacagcagagctaaggtcactagaagccatgggactggggaattgtagtccatgactgcgtgggaatggctgtcgaagttgtatatccaccttttgcaggttgacttcaagctgagacttcaattagagtggttgagcatgctccaatgaagatatggtgtttgaaaccaactcagcgagttgctacatctcaggtaaaccatccacaatcctgtccaacctgtcagaaattcctctgatagcagcactgacatgtaattatcttatttgctcgacgaagctaggaccggattggttattcctcaattattagtatggttaattataagccttgacacgatacagcccaggtaggtgctcaatagacgcctacgtattcatccagcagggtaattttgtaatatttcgggggctcctcataacgactaaaagacagcatggctaaaaccgagcgctcgaatagatcgacgacaccggattggcccgcaacgagacagtcaatcccctaatctccatatgaaagcaaggtagcattagtaaaccaagcaacgaccgaatgaaatatctagcgcctatcctggatagaaagcttctcaacccactcgttcgccgaaacaacatctgtcctatgtgcaaagaccttctccatcagcactcggtgcagctcctcatcacgatccatgcaacaatcctccaagactgtaacacggtagtccatatccattgcctggcgaacagtcgacagcacagctccactggtgattaagcccgcgacaacgagggactttgcatctgcgcagcgcaaaagcatatcgagttccgtagcgaagaaggccgagatgcgacgcttggtgaggatcacttctccagccacaggggagatagttgggtgaacttgcaccgacggttggccttcgatatattcacagcgtgcggcgacagaggagatagagatgttgtttacgttcttttctggatagccgggacggaaagcagtgacaacgtagataattttcacgttggccttacgtgcaaaagcgacagttgacgccaggcgttcgaggtagggctctgtgttgtcgaggcggtcaattatcccgttttggacatcgaggatgaggaggacggttgccatggctggctatcgatgtgtggagttggaagatattggaaaggtagagattgaacaaagatgagtttagatttaagagagaaaactcaagagaaagttgatatggaaaggagatgaaggtgttgttgttgttaagcggttccggtatcatgagatcccggtaccggcatgactagggatttttatacaaaaaaaaaaaagttaactaacgatcgctcacaatgttgttgaatacatgctttgggataccaagaagtgaaggcatatcagtcgagtcttcgtctcttaaccgcaaactgttctaagggctcaaccctttctttcagacgagcattctctttctctagatccccgcgatccaggattaagtcatctcgatccctctttcgtgctttagacgaccctcctatgcatttattcaagatgtctcggtgttacttgaacgacatgaccgaatcagatgagtgtgaccctggagtggcccgagaagcgtttgacaacccaggggtccggcatggtgtgatggcctggtgattgtgtaaagcctcaggctcactgtcggattgatttccctccgactcagagctgtcgtcgccctctgggatctcttgtgattgtcgtggtgagggaggtgaatactcggaggtagagtgtcggctcatttcctccgtgaatgggatgacgggtaaaggaacacttgttcgaggtgtggcccgtgttctcgagactgtccaaggagtatcattcgagtatagacggctatcgagaatggaggttctatcctcaggcgcggccgtagctcgattcccttggaggcagttgcgaagacggaattcatctagcggcacaaggcagctttgacgccaaaaatctgcagcttcttctgctcgcttagatgaagctacctctccattgatccattatgcaaactcctccacgtccagtgtgatggcgttctcattgttatcggagaatctctttctcatatagtcagtatagctcttttgcatcggcccaaaagcgatgttttcgattgggttagagaaccgttgatcgttctggggaaaagaaagacaagcgatcctgttttcccgacagcacttttcgaactccgggaagactatgcgaaatcgatgggaaatcagcagaattctctatgcgtcacgccgacctccgggtcgggtctttgactggaagacggtcttcagccagtcaagtgcatgatccgcctcggcccagcccgactgagtgaaagacaccttgattcgaccaaagttcttggtctgcggtggatcttggcttctgcagacaatgtacggaggcaggtgctttcctcgtgttgagcagcaatgcataacagatgagaatgcccgttcctctctcttgtggttttagttcgttggtcgaacgaacataaggcttgcctttcgataaatggtggtaataaatgcggcatcttccatagtatagatattgtcgttggaaacctggaatcgctgcttgatatctttaaatgcttgaaagaacttccaggctcttcgatcttcatgtggacctttctgtttccgtgtgtttcgctctttggctatgtaaccagcaagttcttgatgacgcaattagaacgccttctgccaaccgacgttgaggttgggtctgtaggtcgtgtagttgtggagatatgcattggctgtatcctttgccaagatgttataaggaaagaatccatgattcaaccaacgctctatccgctcaacaactgcattttcgtcctcgacaaagagagccggcggagccatgacaccagcttctttcgcagatatgcacaagcaaggtgtgtgtggcaagtgagatggaggcgcctcaaaagcgtacccaatattttggtctgacgactaagacggggcggttgaaagagacgcactgcgaagttcaggcaagaattggcctgaaagtctgacggagaaaatttgcactggaagtgagctctagggttgtaaacattgcccaagcctccacactgctagcccagcaaattttccggttcatatcattagattgctgcatttcgtatggctattcgagctttttttcttcaagaagtgtcaatctgggaataaagtggaatgatgctattccactccaggccatagtgacatttatccacccgtgtgaatattttcttttggcttctttttctcccgcgtaattttcccgtttggaattctgttgaggcagtgcccagagactggataatttgaaagtcagttcatgaaataaaatatcatggcaggtgttcagaggtcgtcaattcgtttttgaatggtcgcagtttactacatggagatatgaaattgaagcagcttttttagtacacatgtttcaggagggcaacatgaaaagaacagacgtggaaggacaaaaatacaaagaaacaaaagaaaaatggaaataatgatgcgctggacgttcatctgaactccagagaacctcggtgcaacgacagaatctcgtattcaacgagtccgtgatcttttggaagacgacaatggcgacgattgaatggtctcctcgagcttccagacgcaactagcatagctcaacgtcatttcctcccggtaccgtttcttctcggcggacgataccgtttcgtacctatcaaagcactctctaaaatccggaagcgacatcaccgatggtggtaggaagttcaatttgcgggatgacttgggggttttaagctgccttggtgttcgcgacggcgtgatagggacatgaaaataggagctttcttcttcgctgctcgattgctcgggctcgttctgttccgaatcatgctcggtgtccgaggaattttcagaggcttctggttcttctgggaactcctgggtgggcgttcctcgatgctgtggaccttgcagcgaccgtcgcgaggatatctgctcttggtgaacaatgacagatatgggatcatcgtcttctccaacattgttctcgtctggtgagacatggcgtctcctagcacgaattgggctgttgggctcaacggtttgagatcgaatccggtcgcccgttcgacgtttgatcaatcgtgtacggctaggtggaagcaagcaagtaacaaaccatgcgttcgtacattccgtgctccgatcggggaatccgagttcacggtcaataaaggtcgcaaattgggatggtgaaatggtgtatggacatctctgtcgtaattgtttcttcatatgctctgcatagagcttatcaagggcgttgaagatcccattttcaaaggggttgagatattcactgcctttttttggaagacagagacagatgacatttctttcccagcacgtcacaaagaattcaggcgtcacgggaaattgactatcaatcaacagaagacgtctttggcttcggtctcgttgacctcgctcccggcgcccaaatggacaggtttccttctcaaacacactattcagccaatccagtgcatgcgtcttttcagcccagccactgctattgtacgatatcgtgattcggttttcgtgccttctgggcccttgaacttttgacgttttgaaaatgacatatggcgagagcggtttgccggtggctgggtaacagtagatgacagaggcaaatgcacggttctcagacgatctccggcggcttatgttcaaaggctgcttgtccttttgaattgtagtggcataccccgtgtctgagaggacataaatatgctcattattgagtcgatggtctgatcgaagggccgcaaactgatctatgaattcgcagagcttaccatcttccacggcaggatctttatttgacggttcgcctttctctgccgctcgggaccttttgaattgttcgtgaaagtcccgattgcgagcaaatatcccaccgtgacgactggtaccattgtctgagccaccatggtgcttgaaataggcgctggcgatttctgacaccatggattgctttttcaattgaaatccgtggtccttccatcgttcaacgtagtcaatgatcgctttatcctcgacagctgtaagactgtcattagatgtctgcggctcaggaagtacgccattgccatgtctgggccccagtgcttcggatcttctcctcatccttgccgccatggcgctgtgcgacatgatttctgaccgtatagtgtgactccggtccgcccacgtacatcactctcactgatcgtccaatcaagtcaatgttagaatggcccaaggacagttctgtctgaggcagttgagtgactgggatgtccgaacaacgacgaacagaaattgttcaatgaagttgctgaacacggatttctcacgggaagaacatcaaggcaacgtgggcgttctggacaacctgaaaaataaatgtgagcattgagagcgagcaccggcttataaacactgaccaggtcccaccttgttagctcaacaaaaaaattcggttcaggctggggtacggagtatggatacctcgtctctttttgtttggtcctagattgtcaatatgggtataaagtggatgcgattctacttcgagctagtttccatagtgacaagtatccacataatgtcgaagattccttctggctttgttttcgccgttccggagagtgagtatagcggtgagcaagaataagacagctcgtcggagaggtgcgaactgaaaaaaggtaactgccaggccaacaacgccgaggtgaggaagggaggctctgtgaaacagtatctgcagtgaccgtgtttcttaatgggtggtcatgtttcatgcccaccccggaagttttgggtgtcttgaatattcctggtgtcttcggatttcaaagttcttcggatttcagagtgttcggagtcttgggagtcttgggtcttcggtatccattaaaaagtgagctatgatagacagtgaatatcattggtgaacctggctgcacagcacttctgtttaattctggtggctggcgctgcttaaggaacaataatctgctgataccgccagtcccaagccagcgagtgtgcagtcatgtcggtctggtattccgatcgcattcgttcagatgcatctgcgaacttccgaatccttagctcatatgttgggatatcccaatgagtgatgtcggaccagaattctgacagctgtcgcgggccgagtgcatcccggggagctccagtgtttgtcagcagactgtggtcccgaggtcccactatccacagcggagatgaacgagccattctcgatagaagcagatggctatgagcatgaccgagagcatgaaagcattgatgataatagttgtcacctgtgcatctaagtcagttgctcgacatccaaaggtcaagactcatcgcctgcttacataacaaactccatgacgtcgatgccaaacccatcaaacgaagctcctcgcgcacatttgcgcctttcctatggctgccttcatcattgccaggacttggccaatgacacgtcaacctagttcacatgcaaccactctgctaacctaaaacaattaccatggctgtagcatcagtcccaatcactcacggcggtgacagtgagtatttctagctcaaggatgatgcttagatactgacaagactataggtatgctagactcggtcgcagcgctgaatggtcgcgtcttcgacaccgatcccgtcattacgtacatgctactagacatgtcgcagcaaaaaaggttggcttatctgccgacatactggaccgcgctcatcaagtcagccttgcttaatcgcgcagtgatcaccgaagccgatggctggaaggccgcctctgtcatgattccaccgggtgggtacgttgacaatgcctggactcttctgtgcgctggatttctgggcgtgctgtggaaaataggactcccaggcgtcaaggtaagagcccgatattctcgcagagggcaatcctgactgagctaatgattatctagcgcctttggttcgaattctctggtatgaccgacaacgcgaaaagacttggtctacgtggacagagccagtactactacgttttcagtctcggcaccgagcatgaacatcgtggcaaaggttcgacagccccattcctgactacgtcatactgcatctcttactgatatttgtccaggcctcgccaaagcgatcatgcgggatcaccagcaggccgctcaagccgcgaaccttccgatctggctcgaagcaacatctacagggtcgcgcgctctctatctgtcgatggggtttgaggaaatcgaagagattcggcttgggaagggcaaggtcgctgctgatgctagccctcagcctgatgggccaggagtctccctttgggcgatggtgtggtggccaaccccaactcctgaagctactccctaggctttacaggccttctacttatccgtacgcttattgctagcatgtgtacgtatccaagtgctcatactcatgctcactatgaacaacccgatttattcatatttatacattgtttcatgggcgatataatgctgctatttcaacccagctaacagtatacagcctggctgtttggttgactcgacaagagacaagctcagcaaacactctgcacgctgttcaaatccttaggaataaccccagccttgacagcatctgcaagaagtcagctatcatcgtctaattcttgacgaatggaaagaaaaactcaccctggtaagaccaccggtaatcattcagctgagatttccaggtccagaagatccatccctgctgcttctcataggagtgaacctgcgccgcaaaccactttccatagaagtcggtattcgaactgggctcccaatccgacgacgcctcgatatcatccggcacagaaagactccattcgccgacaatgttgggccagttgctatcgcggttatcaccgcaggaagtgctgatgtagttgtcatgcgaggggctaacactggtatcccatttgatgtaacgatgatcatcataggccatgtaggtcaagtcgtcgagatactcgttgggatcacccgagccccaggacttatccatcgtctgaatatggaggtagtcattcgaatcgacggaaagcttctgctcagcggcacggatacgctgtatattctattagtccatacccgcgacccgaagaccgaaaatactgctcacctcaacagcctgcgggtaatacttcgaccgcatagacgacgccgacgcctcatcctgaacaggctcattgacaatctccaacatgcccacattcctcatctcatccgtctggtagacaaggtccaccatccactcgagccacttgagcgcacgctcatagttgtaatccgtatagaagcccggctcagaagcatactggcccgtgaacgcattttccgcctcctgcgcaccgggcgcaccatgcaagtcgataatgatatacaaaccactgtcactagcccagccgcacaatttcttcagctgatcaagtccaccctgggggaaatgctcgctgtcggcatcaacgatgtcctcgcgcagccagtaaccaaccggcacgcggatggtgttcaagccatagctcaccatctcattgatatcgtcctgcgtcgtccaagacgcccagtggttggcgaaggcggtgttcgcggcgtcttggccgagtgaggaaacgcagtcgaattccgagttctttccgccgcaacccatgccgctccattcactctcagcgatccagggctcgaagacgaattgggagccgaggtttacgccgcggattttgccgttggaggatttgaagaggtttgtgccatctttggcggtgatggatttgttctcttccggtagccaggcgtttgtcagggtggctagggtggtcaaggtggtgactgcggcgaatttagatatcacacccatgatgttcgtttgtaaggggactgtgaatgagattaattggattggagaatggtaagaaagagatggatttcatcgcatataaatagtctctgtcatttcccatacactccacaatctagttcaatcgcatgttatagaggatgtcatgcatgatccacgatgatattggcgtaggatgaaaccgacgactttcctatttgggaaactgggttgagacacgctgcagggtccgggggttgattggcggcagatgctataaatattgacctgcttcctcaccacgatatccacttgagattatccagggtcgctcttaattaatccctcatcctggcggtggtcgatgtttgatcatctccgaacttgctggatttggcaaatgcgggcctccaatgtgtgggccaagatcggcaggcgctacaaccctggggaccgtcggacgttaatgaagacttggtagaagacatcttcgaggtttcttctggttgtcttttgctgtacgttcatagccaagtggtctatcaggttggccctttttgccgttgaagacatcggggtgtccttactatgtaacgtccctaatatcatcgtgggccaagtagatcgggattattaaagtcctacgtcgccaaggactgaaaggcgcataagcatctgactattctgttctattgttcgaaaaagcacttaggccttcatccagcttacacgaagactgtcaagacaacgttgattatcattagagaacattaaaatcatgattgcaatcgctgcaatcgatataagaaaatcataaaatatagcctcctcacagcgccttgagcaattcctggatcaaaggcaagaagcttgtcacgtcatcgatcagcacgcttgtctcgttgacgaacttaggagtaagcagatcatgagcattttccaagagcgcgccaacatccgaaatgacagacggcttgagcaacttcttcacctcgggcaacaaatcgggcacgtatccaagaatctccttgagcgtgctgaccaccttgggggtcaagatgccatcggcgttctcgataaggtctgcggtatcgtcgacaaaggcgggggtgagcaaagtcgtcgcgttggtcacaatgtatcccaggtcggtgatgatggtggtgttcagcagtgactttctgagatcggggatcaggggaatgacgtcgccgaggagatccttcagtccagtgacgatggttggggtcaggaggtcgtctgcgctgtcgaccagaccaatggtctcgttgacgaacttgggggtcaagagggtgttggcgttggacaggagagagccaatggcagagatggtgctcttgttcagaagcgacttcagctccggaagcaaaggaatgacgtccttcaggaccgacttcaacccactggccacctccggagtgagcaggtcgctggcttcgccgaccagtcccttggtttccttgacgaagtctgacgtgagcaagtttccggcgttgttcaagagggcctcgatcgaattgatggtttccttggtcaacagcaacttcaactcggggatcagcggagtaaggtcgctaagaagcgactttagagccttgaccaggtcgggggtgagaaggccgacagcctcggtgaccagagtgttggtatccttgacgaaggagtccgtgagcaacttgttagcgttgccaagcacgttctcaattgcgctgatagtggctggcttgagcaggcccttcagctcgggaatgataggagtaagctgagtgaggagagacttcagcccgtcaaccgtatccgaagacaagagctcactcgcttcatcgatcaaactagttgtctggttcacgaagctggtagtcagcaggctattagcattgccgaggagagtctcgatctctttgacattgcccgcggtgagaagactgctagcctggttgatcagaggaccggcctggctgataagcttgccggtagtcgagataaaggtgggcgtgagcagcttgttggcgttgcccaagagtgactcgatctccttgacattgccctcagtaagaagaccgcttgcctgattgatcagaggaccggcttggttgataagcttgccggtggtcgagataaagctgggcgtgagcagcttgttggcattgcccaaaagtgactcgatctccttgacattacccgcggtgagaagaccgcttgcttggttgatgagaggaccggcctgcttgatgagctggnnnnnnnnnnnnnnnnnnnnnnnnnnnnnnnnnnnnnnnnnnnnnnnnnnnnnnnnnnnnnnnnnnnnnnnnnnnnnnnnnnnnnnnnnnnnnnnnnnnnnnnnnnnnnnnnnnnnnnnnnnnnnnnnnnnnnnnnngcctgcttgatgagctggccggtagtcgagataaagctgggtgtgagcagtttatttgcattggacaagagtgactcaattgccttgacattgccctcggtaaggagtccactggcgtcgtcgatgagagggctggccttgccgatgagattggtggtctccttgacaaatgtggcagtaagcagcgtgttggcgttggtcaagagtgattcaatcgcttgaacgttcttctcggtaagcaggccactggcatcatcgatgagagggccagccttgtcaatgagagggctggctttgtcaatgaggtttgtggtcttcttgacgaaattggaggtgaggaggttgttggcgttgtcgatgagattgtccaccttgtcgataaactgactggacaacaacttattggccacctggaggagagttccaatctccttggtgttctcctcggtcaggaggctgttggcattgtcaatgagactaccggtcttcttgatgaagcttgcagtcaggaggtcgttggcattgcccaccaaggttcggagctggttgtcgaccgggggtgctagaccggtagagagatattcgaaggtgtcggcgaaattacccaagaagctggggttaagcaaactttcaagaccacttagaaggtccccaaggccgccactacccccgagcaaactcgacaaggcatctttcaagtctggcaggatatcagacgatgtggtatcgtcggaactactatcagagctggtagacttggtgcttgaggtgcctgtatcagacgcagcggaggaggtagccttgggggccgaggaggtagtcgccgcagcgaaggagctagttacagcagccgagttatcaacagttccagtcgaactggctgcatcggctgaatctgattcattcgcatcggcaccaagagcggtctttatgccaccgaccacggattccacagggttggccgtggtcgggtctgcggtatctgcaacagcggtggtctcttctgtcgcagccacagatgcagtagccgtgttggcagcattgacggtgtcggcggcagtagtagtctcggctgcgacattggcctgattgacattgtttgcctgagcggcggaggttgtcggggctgaggttgtcggagcggcctcgtctacactgttcacgacaggggtgacggattccaccgaggctgaaggtgcggctggacttcctgtcacattgactgcgaacaggagcgcggtggcgagcgttggcaaaagacgcatgttgtcgaatgagcctatctagctgtcgtttctttggttgataccttgtctaaccagtccaattggcgtcgattccccaaacctatcgttcaaaggtttgttgcggaacaggaagagccttcgaaatattcagaaactcaaccccggagcgagtcatctctttattcgcatttcgatggcactgatcgtcgcgcagcagacagggtcctagctaagcgcaattgcactcatgtgtctttctttgcgtgctccgtacggagtacgaggtagctccatgatcgccgaggaaatagggatcgacaccgaggcagagtagcaatggcctcccatgtgatgggtagtgatgagcaattctcactataactccgctcgatggcagcgtctgaaagcttgctgtcggccgtgcctggggactaggtagtgatcagcaccaaccgggtcaagctaataaatttgctcccgaggtccagccaggtacatgtgtttgctttgcagggggaaggctgggcatccgttaaggtaagccatcgcaaagcttcgtatattggcgtattacggatggacacgggatttccggggcaaaaggccggggcaaaagcgggggatgcattatatttccccacaagtagtcaaaatgaggaacaaggccaatgatggggtggaatggagcgaacgacaagaaattggaagaaaagaaaatgaggggaggttcggacttggggctgaaagaggaaatgaacgacatgtcgctgctcatcgctcatctccgcaagctgagcagttcccagatatcagagttggacatgctattgtcggtttcctttgtattggtatacatttgaaaattaacaagcattggggggttattcatgagaattcagatctcacctacggagtatacataagaaacaatcggcaacaagtacggagtactacaacatatctcctcttcaacgggacgaaagaagttgagatcgtcgagtgtttataacaatgtccaacttggaaagctaaacggtcatctcttgttccctttttgccatttgcttcgtttttattccagatgtccgtcagcctaccttaactctgtatcccatactacctagatctcgatctcttgtcaatgcctcataccttcagcatcaagcgcgtgtccaagtcactcgagcgtgactcaaacgacctagattccagaacccatgtgcgcacctccttctgattggccatgtttcccagtagtctaaacccaaagctagcccccataaactctgaccacgatcatgttgcagtcagtcaggtccccgtggcccgtgggtaaaggtccacgggtgaggagaaggcatgcactcacggagccgcaatctgacaacttccgggactttgtcgcttcagggttttgccaaaacatcccacagttcgtcgaccgtgctcgatgggccatgtgtcatcccaaaggatgagggacatggacactttccatcttagcgaaatcttagcggagaggaacgagcggagctgccccagatactcagcagtctttcccggtcgggttgggggattgaccagcagatctcctctaacggtaccccaggcccaggcacccgctcgacgatctggaatactcgccctcggtccactcctgcacggttgtgagaacgggggaaggtggtattctctttgataaagtgggtgtcgatgacctcatggctaggagattctctcccgcgctccttgagaagaaaccttgagccgagggacagtagcctcgattgctctgtggaggcgcacgctactttcgtaggcaggggacatcggacatccgatgatgacattgagctgtgattccgtatttccttggaatcgggatatttggtagattaaaatgtctcggactggtgattgaaggaatgagggagaatcacaagatagactggtcggttacgatgtgctctgtagcggtgagtcaagggactttccagggtatacgggcacataccacacggattggtacattgggcagtgacctatcgtcgagattaaaatgatccatctcggttgggtagattcagagcctcggattgtaattttaaaagtcggtgatggcattccttcaatggtcatattggcttcgaaatatgtatcgtggtttggagactaatgcaggacagccgagatggaaacttagtagcaagtgatatagtatgtgctataaaaaacaagtgtcgcactatccattctgctctaaccgtcggctacttcaaacatttcatactagaaggaaccgccaagcgttgggcatcaaagttgctcccaagggtttattcctgggctacttgagtccttccaatatttgaaacccccaggattgcaccaactgctggtctaggatactattagttactcaggatagccgtgtttgaaacaggactgttacggagtagtgttaggcgcacggggttcaatgcataggggtattataggggtattagaggagtatctgaaccccaagtatactacatagtatcctgtccatagttcatatcggttcaacccgagatacccgaggccggctccgaaatatgatgccggcagtcccgggtccacctagaaatagatatcatatcataatatcataatagatgcatgttgctacagaagatagacggggtactccgtactccgtctctaccccgtgtcctcaaacaacatgccattacccgagatggtccaatgtcatacgaggcaggtcagcctagatcctccacatcaccccatactcggccaagtggatcaacatcagacgataccttggggacaaacgaacggggataactcggtcggccgaaactacgactccaccgtcttcggatcttctgtcagataagtgacaagccgaggtcagagctgttgagatcgactgacgtgatttgatggcccagctatgtagcagtaccggtggggaaaaggatcggccgaatatcccggcactcgagcaagacatctaaatgggaatgtgccggttctgtgcacttgacttcttcgactttcgactctcgactctcgactttccactccatacaagtttgactgcaaatatccaggaccttccttatatttggaaggatttatatatcgcattcttccccacggggtacgtgagggaaggggtatgtatatagatgctgacctaggaaatcccgaggtattcgacgattgtatattcccgacattccacgttcccacgttcctcaaacgccagcacgggaaaccgaagcaaagcagttacactattgggttccctccgctcatgctggggaacaacatcacgtccgaaacccgaccaaggatattccgcatgctcaacccttccatccgctgcagacctgcattggtggacggcatgttggggctgggttcgagagagggaggggaaggcaacacaagcggggaatatgtggtgctggatgctggccccgtcgaacgattcgtgcgggcgctgaaggcctggcggatctcacgcagggcacggagcgacgaagacagatgcttggcggagtcggtgcggttgttctggtgcatctcatcgtctgcatagacatggtccgctagaaccatctccagcctgtcgatcagctgccaggtctgggggctgtcgtcatttgcaacgagcagaaacgccgatgcaatgcttcgctgcagactgatccaggaccgtgagcagtgggaattgatctcgtgcaattcgacaaacgcatcgattgtgttgaccaggctatcgatgcagtcttcgcggatcattgcacgacgcggtgcgtccaaatgggaatgtgggtcgagggagacgcgacacaagacagagagaagataggaagagtgcaggcgcaattcggttcgctcaatatgctcggctagagaccgacagttgtcgcgataccgcagatgagaagtcgcttcagcgagcatgcgttggatttgttgtttatactcccggatctcatggacacgtaattgagatgatccgggatacatgcgcgaccgcaggacttccaatgacaaggatacaatgcgacacagagtctcgaaatatgagcggtggcccggcattgatttaggatcgaatggaatttcgggctggctgaccatagtgatcgacggtcggtcataggcaagtgagaaatggctgttctgaaaggccatggtccacctaggaaatgtgagctttagattaaccaaaagagcaaactggctacctaccagacgcgccttcgcacttcctgctccgcgagtgagaacccgctcgactcaacatggagcccgaggacaagacacattcgctccgtcatacctgatgttgtgttagcttgaccatctcattggaaacacccccacgtaccaagcaaagtgtatgatgcacctgcattcatattgtatgaaagtacattgctaatgatgagaagaatctgaattacttcgacactgggttgcgagacataattcaacattcgaagacattgatacgcacacgagactggagaaagtcagtacagcacttccgaccttcctagaatgcgacgcaccgtatacccatgaggtcaactcacggtcgctttccgggatgccagacagctggcaccccgatgcaagaaccgcaaaaaggagactgagaaaagccaacggcatcccgaatggtttcactaatccgttggcatcggctttataaacaccccctgctcgtcgtcgattatcgagaagtcgtttcgtatgtcgtcctagttgtgcagtgtctgaaagtactgggtataaaactgcaccgatatcttgataaaacgccaggaacctgacagttggaattagcatgcatcgcagaataccacagatctccggcttactccaaacaccggccgtcttccgggagaaccgcacaaacaccggcgatattgaaggtgaacgggtcagaggtccacaaatccacaaaggggtatgcagccgactcattccccaaagccagttcggcaagaagatcatcctggggcagcgcctgcgctgtgtcctccgactgctttgatttgtccaaaatatcaaccagggccgaccgcgaccccagatgtaccgcgcccgtcttcaagacattcgacccgtagacaccttccgaccgggtggaaccttttggttcgaccggttctggttctggttctcgctctggctctcgctctggctcgggcggcttgtgagtcgagtgtgtttggaagagcgagtgcagactgccgaggatctgttccattgcgaccatcttgttgttaatttcatcccactccgcctgggagatatcaattatgtccggtaaatccggatcggcgctggtgctcgaggggtgatcggcatatgagccatcggttgtgggagctgagctggtatacggggggttcgtgggggaggcgaacgtagactgctgtaatggggtggaggaagcagtggcgacggtagcaggagggggatgtttcgtagaggacggacgaccgtaggagcaggggaagtttcgtttggtgcaattgccgcaggggacgttgcgatcgcagcggaccttgctcgctcggcatgggagacatgtcttgcactcgcgcgggcggcgacggatagggtaagttggcataatgtggattttgtactctttttatttcttcacaatcggatccccgtgatcggcaaaggaattatgggaagggctgcctgcggcgaccgggcaataagagggagcggcataggaagacgtagatcgaggtgagggctgaaaatggacagctctagtgctgaccagtcggaatggcgccaataatgaattcaatagaaacgaccggccctggagcgattgatgcgtccaacagtgcctatcatcggaggtccgtgagctgccccggattgtcctgcgaaacagggaaacccttgggaacaaaataaggaatgtgaaaggacacttcttgacagtgccaaggtatgtggagaattgggattgtcggattgggaggtcggattcaatcttggaaggtgaagggtggaaaagagttgtgaaattgcccagaggcagatgatttcataacccagcggatgttcccgttcgctacggatgtgacctgatttggttgatttgtggatttgttgatttaatatacttcgagttaccttgacataggagatatacttgattactttcattggtagagtcatgtaaatggtcatttctaaagcgaataaaaggtatcactggtacatcataacgactaggaaatcaaacacgtatatgcctctatcattcacgccttagacttcttctcagacacctgcgggaccacccaccagtcatgccaacgaaacttagatccaacctcgggcacagtcacctccaggttgagagtcttatcatcggtagatgtcgcagagagagccttcttgaccgcatcaatagcaagactagttccaatgcaggcacgcatggtgttcttcgtgtcacgcttccaatcctcttcaatggctgccgatttcggttgagttggtgcggacgggtcatcaataaatgtcccattggcaagggtcgcctcccacgccttgcgcgcttcggtgatggctttcgaggcacgctccaaaatggtggcgtcggaatcaccttcgagagctgcctcgcgctggtattcctcgtatggaaccaattctggcaatgtgatagggatgaacggtttcatgcggatttcataccggagtcggtcgctggaatatgcttggggagacgaagcagacgggagcacattgtgccgggccaatacaacatacaatgcatgtagagcaatcgcaaatgcatccaccgcaatgatatgcgtagtcaacctctctagcgcgtggaacgatcggtggaacgcggacgcatgtcgagaggaactcccagagtgctcgtcagtagacatcaagttgcgttttcgtgcagccacagtaaacgtgcgaatgcgatcaatatggccgagatgtgtagagcaaatatgagaaagataccagtacatgcccggtagctcttccggggagtagattgacaactcaaagcccatctggagaatgagtcggaactggaggagcttctggtgataggcccagctactaagtgggaaagaccaggtcggttcgccgccctggaattgcagaggtggttccccactcaaagtgcggagctcgaggtccatttcttccgcctacattaagtcagcattaatactcaaatagcaaagagacacgaggcaggactcacctcgatctgtagattatcccaatcgacgagagtatggcagagtgttcggcgcatgcgacacctattgagacatgcgcatcgcacagtatcaacaaacggctgtgagggttagcaaatgggacatgtcatgatctacatgttcactaacctgggcgaatcgcttcatgaaaccatccatcttccgagcaatctggaaccgaggatcagacggcacttccacttcttcagtgttagcctcgagtaaaatactagcaggtaagacgagttccgcgagctcatcgtgtaagaactctttcacaggtacggtaccgaggatcgtcatgttgctgacaatcaatgcctgaagaagacaacgaatataaattgacggctgtggttttcgagagagcaaagtccatacggcagtctgtaaaacaagttagtgctaggactacactcaagttcaagagtacataccttgaaattgctgggaccggtataatccagcatctgctgcatgtctatcgcatcctggcacagtcgtttcagatgtgtgagcgcgtcatcggaggtaatattaaccatcggacgaggcggcactgtgctagccagctttcgttgaatcttcaagctgaaggcatctggcaccggctttcccagagcgactgtctctgtcagaggtcgaagttgagttatacacgaggcgaaattttccacagatctggtttcaagaacttcaacatcctgatgtagtgcagacaagaactcacgccgaaacactagtctgcaatggatggcatccttgagcttctggtctatgtcagtctgctccgcaacccaggcaaccgcctggtccagcaggcggtgaaagtcggatatattgaaggcagacagaagattgcgattgtataattgactgacaaaatcctcttcctagttgggtggcattagcggcagtcaaagaagttggcgagccagcctactaacctcataataatattcagtggccactcggacatgcacaaaatcacaagctttcactaatgcaagacaataagctctcaagacgaggttaaccaaaggagcatcacttggtacacggtcaaatcgagcgtcgttcatggttttgggcaccggccacagtaatttatcgagataaattgacgtgaatagcgtctgcgatagaggatgtcccttatgccacgccacctgcaattaagtcagcaacctgccatcttcatatgtgcgatattatctcccacctcgtggcatagcaactggtccatcaagccaacgacttcctctggtgtcaacggccgccgtacgtcgtagtcgtcttccagcgcctgcgcaagattttctccgggggctatgtagccactgtccatccttgagtccataatctgtgcgggttcgatcgtcgtcagctgcaattcttgtcgcacgtttcacatctggtgagaaagccgacacacctccaacgcgcccacagcctcgaatagggtgaatgtctcatctttcacgagctgccctgcatttagctctacaagtacaaatgattagacacttaatcgaagctttcgggtagtatgcttactcgctgcggcttttgtgaattcagctgtaatgtcgcggggtgcggactgctcaacgaaccgcggacggcgaaagcgaatctcgttattcggcagcatcgcgaataagttctttccacagtgctagttctattacaggacttcaaacaagtctcgtgctgccggacgtgtttcgagagatcaaatcgagggggaggcggggatgtgagcggaggaaaaagcgagtcgggaagtcgacaaccgggcctagaggtgacgtgcaacatctgaccggccacgcccgggcaatatgagaattcttacagaagttttaactaacagcttatgggtcatgtgaaaacaaagaccagtgggatttctaagctctgcccaaccagacaggccggtattgctacacatgtacatttcaatgcctcccccggaccaaaaactcgctcaagtccgtcacactcgggtcctgcatatctccaagctcgattctctcaggttatgggggaataaggcttatttctcagcagccttggcgatggcctcgttgttggcctgggcgagagacttcacttcaccctgcttgccgttctgttcatcggaacattgtcatcagtcaagattccgcatagagctcgagaggttcacttacatcccacttggcgaaacggaggtccatgactccgcggcgctcagaggcgagacgaggggcttccttcaaggagcggcgcaccgtgcgggcggcgatggccaggtagcggttgtagctggggtcgaggttagcattgattcgaaagagcattggtgcacgcgtacgtcaaaccggcggctttccaggcagcagtcattttgaagagaatgtggaggtatgattcgattgaaggggtgaaaacggttcgggtgagtttggaagcgttcgacttcggaggatcgggatgacaggatcacgtggggagcagtctacctttggaaggcggtggctagaaaagcggtgaggatttacgcggttggaatatttgatgcctataagtcacgtgatattggggtaggtctggtcagggaaagtatttatccgacgtttatccgacgtatattgatcagtactagtatcacctccagggcttcatgtcaccagcgtttatttcgaccacatccttgtacaacgaacactacaccacgccacacaccatgttattctaccccaaaatgcccgatatgtagaaatatattgctattcgccattgggtcaataatacttgcattctgttcttttcatttccttctccgaggtggtggatgtttatatagatccttcgtcacatatgtaatgatatccttatgcaaacaacattatacaatgcgacacactatatcatccagccatacatcatccgattcgtaaagttataatcgctatgctgttggctcatcaataattctattctgtgttcttcggttttttcttcgagggtggtggggtgtagaagggttgtggtgaaattatatagatcttttgtaccaagaggggcaaactgcgtatcgcctccagctcgaatgtaagtctcgcagccacgatgcgtcttcgcagcttcgaagtgctagatcagatggtgtatcagcacatgtaaataggaatatatactccaagaagcaggcttgctgtgcacaagaaggattacaatctgcctgcttttggtgcagggtatgaaaaccttccattcgggttgaccagccgtgtacaatacacgtgcttgacctcgaaaccaagagcccccgaaggcaacaacacaaaaatgtttcaaggcggtccattgcttcagagcatttgctatcccccaccactcctcttggtcaccatatctctcacttgctcttcattctcatcgacattcatccatctcccatcgtccacaacattccccatctttctgtgctttgataccaaagcatctcgaatcgaaggtgcctttttatcatatccaccaggtgagtagcccagttttgtactggttatagtccattggtttccctagcacatccccacttcctaccatagagctattgcttctgtgcatcattggcatgaggtcctgtggcacactgtggttgttgagagctccgctgccatccagtgcttagccacgacccattgcctttgtcgatgatcgggttatgcatatcaatgcccaacatctggcaagttcatctcaattgcctggcgtctgggcatgagtggcacaagtcgtccaacaagttgagaatcttgcaattttcgatcggataccgtcatccccagtacatggcattggggattggtggtattaatccacaattgcatgagaccatcgttggtcccgtgcccttctcagaaatagaggatgttgaaatcgcatgcagcatcaatagggtatcggccatcagttgctttgagcatgggcattctggaaagcttctttgggccacgctctgagatcctgcagtaatggtcagccttgtcactatctgcatatttatcttaacatatcctgcttgggcggtgctcgataccatattccatccaaatgcatactgcaaacccattctcattgtgaacactgtgtgttcactgtgtttgatccatatttctgctttatcggagtttgacagcaatgcaacaacacattggccgtgcccagtcacctacctcacgccccgtccatacattccagattcattttcttcttgtgagcacaaatgctaatgatgatattgtgcagaaggatataaaggactcgtccatccaacatgccgatcaagaaaaaagccggtacccgaaagcgcgacaatgaggcggaccttgccgagctcgaaaggctccggaaacaagttgctgaacagagcaaggcgctagaagctgaagaggcccgcagggaggaagagagccaggccaagcgccaaatcagcagccggcgccaacggacactggttcgctgggatggtaagttcccaatcttgttccgtctttctattcggggatgttgtccaactgggaacatcatggaaagatatactgttgtcacatagacttgtattcaagcagaggatttgccaatggattatgctgacatttgactgaaatagtggataccgacattcggcttctgttggccatccagtatgcctgcaataagctcagcgtgaagattccctggaaggaggtcgcggaagttatgggagagaagttcacggagggtgcgatcgttcagcatttgtctaagcttcgcgccaagcgggaggagcaggataagccaaatccgcctccactgaaacgtgcagcgagttgctataacaagaacgacgcaaacaagaaggaggcgttgtctcctccaaaggacgaaccaccgagcactcgcagcggaaagcgccgacgccgttcgccgtccgttgaggaatccgacgacgatgtgtaccccatcaagaagaaacagcctacaaagaacaagaagaaggacaaggtctccgctgctcctaagctgcgtggagagcgagaacaatccgagagcggtgactcccggaagctgctgtgtgttggagcggaatggctgcgtgacttcgctggcgacgactgtgagattgacgacgaatcggctagttctgaagagaacgagaacgaggactcaactgaaagcagccacgtcactgctcaagcggctaagaaatcaaagatcgtgacactcaagctaggccgagagcgcctggcaagtgttgaccgctaccttggtggctctgcaactttccgggagcctatggcctcaaccaacccgttgcgcgctatcaccaacatgccaccccgtcagccatcctaccgcacttacatgcactccgttgggcctttttcgcctgaccccaccactttgtttgggaacaacatctcttacccatccagtggcccaagcccatttgacattccgatttctgacgctgatcttgctggagcctgtgcttttgatgatgtggatctcacagcaccgtattcacagtttgatatcccctccgaattgcaatttgacccaatgtgcagctacctcaataccagtggttttgacaaccagttcattcccgacgatgaactgtttgcgtccgttcctgacgtagagcctcctcggtactatgggtacgggggtgaagaggtccaggaattttaatttcctgggccgatcgtcatggttcctggttgctctgatacttttcaatacttttccccagtgctttccgaggcttttttcttgtttcctcctttcttggccttttctttgcttttgtttttccttttttccttttctcgctggttggtcggaggagatgggtgagcatcgatcccgatttaacggtgcaactccggataataattcttgcgtggcatggagtcatgtgttatctgaagttgtaccctagcgcttctttcatgcgttgctcgttggccccctgcggggagcccggtagttagttaaatcaataagagcatatcgtatcgtcttctttggaagtaccttgtaggttagtggtgggttctcactgatgataaaagcgaagtcgctaattcgctagtatagaaggttgccgaacaccggatatacgtacggagtagctttccgaggtatatatttgaacacatcggcttggacctatgcatcacgtaggaatactctttcttcataacttttgaatatagactagatgttccaaactaccattctccatcacatttccaatctaataatctgctataacaccacaatatctacaatatttccactgccgatctaggtccgttcttccggctcacgtgatggttctagctgtttctgccgccaagctctggggatgaaggaagcgcctggaaaattttcgagactttagcttcatctctcccccagctttctccatctcttttctttttcccacttcaaacccccgatctctcctgggttgttgtatttctctcttcttttaatccttttaatcccgttgtttccagccatgcagcgcgctctctctacccggacatccgtcctgtcggccgcttccaagcgtgctcctttctatcgctcaacattgaacctccagcagcagcgttttgctcacaaggtgcgttggattgacaattacccgcgggatcatcttgttctgcaattgacaccgtgttccgtccattccgaagcgtttggccgttccctcgctaacagcaactaggagatcaagtttggcgttgaagctcgtgccagcctcctcaagggtgttgacactcttgctaaggctgttacctccacactcggtcccaaaggtcgcaatgtcctgatcgattccccctacggctcccccaagatcaccaagggtaagattcatatcaaaagaaacacttggccactagcaaaaatactaattattccctagacggtgtaactgtcgccaaggccatcactcttcaggacaagttcgagaacctcggtgtccgcctcattcaggatgttgcctccaagaccaacgaggttgctggtgacggtaccaccactgccaccgtcctttcccgcgccatcttctccgagaccgtcaagaacgttgccgctggctgcaaccctatggacctgcgccgcggtatccaggctgccgttgaggccgttgtggaatacctccaggctaacgcccgccctatcaccaccggtgaggagattgcccaggtggccaccatctccgccaacggtgacacccacgtcggcaagctcatctccaccgccatggagcgtgttggcaaggagggtgttatcaccgtgaaggagggcaagactctggatgacgagcttgaggtcaccgagggtatgcgctttgaccgtggttacacatccccctactttatcaccgaccccaagtcccagaaggtcgagttcgagaagcccttgatcctgctctccgagaagaagatctccgctgtccaggacattctccccgccctcgaggcctccaccaccctccgccgccctctggtcatcattgccgaggacattgagggcgaggctcttgccgtctgcatcctgaacaagctccgtggtcagctccaggtcgccgccgtcaaggcccccggcttcggtgacaaccgcaagagcatcctgggtgatctcgctgttctcaccaacggtactgtcttcaccgatgagatcgacatcaagctcgagaagctcacccccgagatgcttggctccactggtgccatcaccatcaccaaggaggacaccattattctcaacggtgatggtagcaaggacaacatctcccagcgctgcgagcagatccgcggtgttatggccgatcccaccacctccgagtatgagaaggagaagctgcaggagcgtcttgccaagctctccggtggtgtcgccgtcatcaaggtcggtggttcttctgaggttgaggtcggtgagaagaaggatcgtgtcgtggacgcccttaacgccacccgcgctgccgttgaggagggtatcctccccggtggtggtaccgctctgctcaaggcctccgccaacagccttgctggtgtcaagcccgccaacttcgatcagcagcttggtgtcagcatcatcaagcgagccatctgccgccctgcccgtaccattgttgagaatgccggactcgagggctccgtcattgtcggcaagctgaccgacgagtacgccaaggacttcaaccgcggatacgacagtgccaccagtcaatatgttgatatgattgctgccggtatcgtcgatcccctgaaggttgtccgcaccgccctggttgacgccagcggtgtcgcctctctcctcggtactactgaggtcgccattgtcgatgctcccgaggagaagggccctgcccctcctggtggtggcatgggcggtatgggcggtatgggtggcatgggcggcggcatgttctaaagcccctgacccgattcccctaaagaattacctcgagcgctcttctttgcatcgtagcctgttctgatactcggatgtttgtgtaatgtcttttcttttgtgtcttatttggtgttcatcttctttcatgttttttccccatacctgtattcttttggacgtgttctgatctccgactctctctctcctctcctctcctccctggggcttgacaaaacaggttcctctgtactatatcatgtattccaataaagtcccatctgatacggcttgctgaattatgtctttttcgggatcgacaatgtccccgcatagatctactgaagctcctaacagtctcgctagaaagtattccctacgaagtacaaataggggaaatattttcacgtaccccatatattagcaacccaactgattggctacgcgggtcggctgttttgtgcagtctatagagccataagaccaaggaagggtctagactgaggcgacgggcgaatacgacttcagacgcgcatgatacacgcaatgatgggaattaatagcgatagagaatatatgttggagtaaaggattccaatagccaacgtaagccgatgtaagtggttgggcaccgcaattaaccatgggtactgctgttcttctctcgggctcttgaatcctctccgcctggaccctttccctcgcgtcaccagatcattccgccattccagtcctgcatttttgtgcattcttgtacctgatctggattcgctctttcaatccaagtttcgttctcttcctggaataccttggccatcgggaatgcataccgcgcttgcggggaacacatcgtgttcgcccctccgtcgcctgtcaacgtaggtacgatcatgactctctgatattctagtctgtcgccaacttgcttttatagtcactgcgcgcttagagagccctgagccaatttgaatcgaaactagactgtgactgctgccggcaatggctgccatggtggatgctcgcctagctctggtgagcgatgcagatctcatgcaagcacgagcagctcttcagcatcagcagagtccagaagtctctgttccccgcgaattcatctctctcatcgtcgaggaactcatctaccgccgcgagtcgcattcctccatcgcggaaatcgaacacgaacgctcaatcctccggaaggaacttcgcaagcacacccacatcaatgaggcattccagaaagaactacgggagatcggcgagatcattacccaggtcgctcatggcgatctatcacagcgggcccgcatgcaccccctcgagatgtcgcctgatatcgctaccttcaagcagacaatcaataccatgatggatcagttgcaggttttcagtcaggaggtatcgaaagtggccagggaggttggcacggagggtgtattgggtggccaggcgaagatcgagggcaaccagggaatttggcatgaactgactgtcaacgtgaatgccatggccaacaatctgaccacccaagtccgcgatatcaccaccgtaacgacggcggttgccaagggtgatttgcagcgaaaggtacaggcggattgtaagggcgagatcttgctgttgaagaatatcatcaactcgatggtcgatcagctacgggaattcgcattcgaggttagtcgcgttgctcgcgaggtcggatcggacggtgtgctcggcggccaggctgttgtgcacggcgttgagggtacttggaaaaatcttacagacaacgtcaaccggatggcatcgaatcttacacagcaggtccgcgaaattgccgatgtcacaaccgccgttgcacgtggtgatcttacgaagaaggtgaccgcggatgtgaagggcgagatcttggatcttaagcttacgataaatgcgatggttgatcggctgaatcagtttgcgttcgaggtcagccgagtcgcacgtgaagtaggaacagacggcacgctaggtggacaagcgcaagttgaaaatgtcgaaggtcgctggcgtgatttgacggacaacgtcaataccatggcgcaaaacctcactctgcaagtccgacaaatctccaacgtcacccaggccatcgcgcgcggcgatcttagtaccaaaatcgaagtccacgcccagggtgagatcttgactctcaaagaaacaatcaatagtatgatggacgggttaggagaatttgcgggggaagtcaaaggcgtggcgagggatgtgggtgtccggggtaaactcggtggccaggccaacgttgcgggatctcatggaatctggagatcgatcagtgaagatgtcaatacgatggcagacaatctgacctcccaggtccgtgcctttggtgagatcaccgaggcggcgatgagtggagatttcacaaaattgattaccgtgtctgcctctggagaaatggatgatttgaaacaaaagatcaacaagatgatctcgagtctccgcgacagtattcagcgcaataccgctgcgcgtgaggcagcagagctggcaaatcggagcaagtctgaatttctggctaacatgaggtatgttgatcgttttactcggtttcataggctttccttttctttcgcttgtgctaactacaatgtagccatgagatcaggacgcccatgaatgggataattgggctttcgagtctggcactcgacactgacgacctccaagctcccgtgagagagactctgaatatggtacacaatcttgcaattagtctcttgactatcattgacgacatcctcgacatctccaaaatcgaggccaatcatatgattattgagaagacgccattcagtcttggtgcaacagtgtttagtgtgctgaaagccctctctgtggaaactaatgagaaggccttgggtctagtctacacagtagatggagaagtaccagattatctgatcggagacgcatatcgactacggcaggtcatgttaaacctagtcggcaatgctatcaaattcacagaccacggcgagatcagagtcacggtaaagcatgtacaggacgacaagtgcgcctcagatgaaacgacattccagttctcagtctcagaccctggaatcggcattgacgaaagcaaacttgccttgatctttgacaagttccagcaagctgatggatcgatgactcgtcgctttggcgggaccggtttaggcctcgcaatttcaaaaaggctcgtttctctcatggggggtgacatctgggtaacctcgcacatgggagaaggcagtacattctcatttacctgccgagtgaagctagctctgccgccgcctagctttgcggaccagcttgccccccaccggggtcaacgcgttctgttcttcgaccacggtcttgcgcgcagcttcccaatagctacggtactcattgagctcggaatagaaccagtcattgtgacagaggagcagttagaatgcggccagttcaaaagtgattgggtctgcactttcgacgcaatcctcatcgaaaacttggagatcgccgcaaagctccgagcctgcccggacctccaacctattccactagtcattacagctcatactgtatccctaacgctcagagctgccggtgaactcggcatagcatcctacatcacagtgccctgccgacccattgatctatggaatggcattcttcctgccctcggcaaccgcccaacccggaccccatcaggctacacacggtcgttatcaattcttttagcggaggataatgacgtgaaccaaaaggttgccgtccgaattcttgagaaattcaatcacgaggtaacagtcgtggaaaatggcctccaagctgtgcaagaggtcaaacaccaccgctacgatgtggttctcatggacgtccagatgcccgttatgggtgggttcgaggccacagggaatattagacactacgagaagctcaatgggcttcctcgtacgccgattattgctctcactgcacatgctatgcttggggatcgagataagtgcatacaggccggtatggacgattatttgtctaagccattggactctagtcgcatggtgcagactattctgaagtgctcagctatgaatcttgccccactgcctgttattgagggctaaaggccactggtatatgggttcactgcctaattgactccgcctcttatttcccccttctccaaccctctttttaactgcctataagccttttatggctgcccagtcgagtctatttcctccgaatgagctcggagcctcatttcttcccaacctccaagaggactaatgtcctaacctcagggaattcccctcctcattctcgcaatctgtacacatatcgattgcttatgcgccccaacattttgcggtggaagcgcagaccttttgaacttctattcttttgaaataccccatcgtgtcggatactctgttaacggttttctttcaaggtgatcaaattctgtctctgttcatggtgtttggttgacacgcgagatgaatacatttaaatcatgtctaatgtctaccgtggtatgccctgtctgttatcttcgcccttatttatgcatctccttcagtacacgaactcatatatgttgcgaatttagaaacaaaacattccgaagcctatttgtctctcttgttgctatggtcagaaatcaaccggtacgttgctatactatgcgtatgcgcaagatataaaagggtatcaaataggcgccgaaaacacaaaatgatacaaagaacatacagactaaacctccccggggcgtctccgatcaaatccagaatttatctcatacttccccttcttgtttcccttccccgcagaaattcgatccccctgccaccgccgccagatatcctcatcacgctgcatattccgcctcccataacccagatactcatcaaagcgtttcctaagcccagagtcctcaggcacgacgtgaataggtattttacctgtagcagaaccccataagaatgatttaatcggatgcaggatgaagtccttcgataggcccgcgccgatcttgtgcattttggatacgatatcgcgtagcgtttcgctgaaggctatgaagagggacaggaagattattgcaaaggatgccggggctggaaaatgtcagttggtatagtcatatagtgtttgagacgaaacggacctgctatttcgaacatttgtcctagggttgggtttgcctgttccccgctccattctcgggcattgattccaaacaaggaggtaaagaaagatagagggaggaagcttgaattgtcagaactgattcttggattttggagagtatgtagacttacacaacactgaatatggtgaagaccatcactgctcgcgattgcgtttgggcaacttcagcttgccaccgagtcatcttggcttcgtcgacatttgcctgtttctgcttgaggtcaaggagcgtttccacctggctggttagtaggaaaaaaaaagacgtgaacggggaacgtgggaactcactgctttctgcgctagatggctgttttctttcatctcattgatttgtgaacgatattcgtcgattcgctcttgtgctgtatcgaggaatgatttaccgcaccctttgttaccgaagtatttcaccatatttttgataacggtgtcttgttgatcgagcagctttaggatggtggatagctcgtcttcgatgtcacgcagctcaagcagaacggatagatcttctcgatttcgacgagcaacctgcaattctttgtaatcttgctgcgcggctgtcatgatcttgccgtctgaggtgcggtcatgatccgctgggcggttggtgaagcctctatttcgaaagcgcttgaaagacttcgtcactgattcggtctgattttgttaatatgatctacccaaggagttgtcacgaagggatgaacctaccaatatgctgattgactcctcgaagattcgcaatacctgcagatcatgattgagagtcttatccaggagaacagtgacagcatgcagcatgataagagcagccaagtcaccggcggtctcaaaccgacgcgagagatccccattcaactcattataaatgctgcgatgcaagttcgactgttcaaaaagcttcccctcagaggtcgcagcctcttgattcggaaagaaagtaacaacagtcttttgatccacaatccaaagccagagctgatcaaccatcaggacattgccatctagaaactcgccaatatcctcgttatcgggatcatcctgtgcagactgcagatactcttttaattgctcatcaatgcgcgccggtctgcgagtgcgcttccaaagcatctggtcgtcgtcacgagcgatagtcgagcgtagattgggatacccatattgatccaatgtgcggcggaaatgtactggaggttcgcagccgagatagctccagatgagttgggcttccaggcttgcctttgagatccggcttgggacgggcttggatcggccctggttgagtcgatcttcgaccaccttacgccgttggattaggttgcgatatgtatcccagtggagctggagtgagttagtacagtgcggaagaagggtactgggtcaattgaaagtactaacgtagggaacctgacaaatatatatgttagtgctgatattcacatcgaggacttgaaacatacatatagagcgagctgaggatccttggaaggattagaaggacgttctgaaatatccatttgtctggagtgaatgcatgcgggcttgacgaaacgtgcatggggctcgaggtgacgagctctattaaaccggttgtaccaattttcgtcattgataaatttccgaacactgcaaaagatagttagcaatgtgcagaaccgtggagttagttcatatgccctacaaattaggctcttgcctatcctcacatgctcggcgaatgacttgggatacccagccagtatgcgtatatggcacatgaatccacatcagtttctccgtatcagcctcaggtcgatcgaagcgtggaactgctcgaggtatatccggtttgtcggcattctcgttgatgtgatcacgaatggactcgggtactgccaggaaagaggattgcactggttgtgatgcagaataggtcctgttatctattagcttacatttgttggttttcggcaagcctcagtggtttacttacgaatgtggctgttcaatatttgtccgggagctgtcagaagcacttcgactgtgggattgcttaggtcgaattaattccaccagcttggtgattgagctctttcgttttagttcctgtggcggatatgggctttcattgggtgcgtcgctcgagtagccctccatgtctgcttcggtgatgtggatattcggagagggatcggatggatcttcaaagattggcctgtagggtataggggcttgcaggaaccttgatttctcatcatgatggctttgaggatggtgtggatcggagccaggagaaacgtaggatgaaccgggtctagatctaccataactgcccattggtgaatggtccaagccactgggtcggaatcgaactagtctctcccgaagacaagctgacggaccccgagagatgtactctctcagggacactttggttgaccacagcttgagcggactttcgtcactgacacccagtgcagtatcctcgaagaagccgttaatttgaaccttgacttgctcttccacgcgtaacggaatatcctcgcgctgggaaatttcaacagccgtggccacagcattagcaagctcatcgaggaatcgatctcgtgtagactcctggccatggaaagttgccgtccccgcatggtccgttgccatgggcacttctttttcatgctcaatatccaacaaacccgaccgaatcgaagtaatgggcacatgaaactccattatgttatgagtctcggtgtcgatcacctgcatagttgaatccacagtttcgagaaaagaccagaccctcatgtcagccgaaagggttttgaactggttcgacagatgccataggtgctcttgacggggacgcaactgcatcctgagcgctgccggggtctcacaatccagatgcaggagtcgacgtatactagccgcgtattcatcggcagagagataggtcgagccttgatggggagttgcaaagaaggcgataccatgacagttgattaaggtcgactggctcgcctctcgtgatgccatggccagagctgctttgacgacgagaccaccggtgctgtggcaaataaaaaaaatgggacgtcgagttgactagggaaatgtttattaaattactcttggatatgaaaagacgatgacatgtgactaacctcatgtgtccactcactatggagttggttcaacagtcgttgacccaaggtatcgattttgtcgtcacgtaggtctccatagttatatagtaggactcgtgctcgaggcacatgctgtagtagctcttcatcaagccaggataatttcgcgccaggcgctatccacgtctctctatgatgggcgccgacgggcgggacagcgacaatactgagggatgagttattatatgatggtatgataagatggaataacttactcgacatcagtatcgtcatggagagaaacaggctcaaaccacgagcgcgtctggtcgttcacgggtggccgcgaaggcatcttgtcgagtccggttgaatatagcctcagtatacaggacgaaaacaaagctgggggaaatcgggatcaagtcagaggcaacctggcgagtcttaaatcccacaaatcagaacacttgagcctcttcgttggggtccggacgatcacgccccgacacgctagtttgcccgctgacagtcgtctccagggctgtgtcagtcaaaatgatatcgctggggctatgttatattattatatatccaaagagagagacttcaattatgtttatacagagaaaacaccccagattccaaattccaaaattccacatgctaatgcaccactctataacggctcatgtatcatcagaaacgcccataacaaaagggaaagtggagagagacagcgcatatgcattataattgtacagggattatgcgtcagagtgtcgcagttcgttgacctctcgggccatgcgctttccaagctcataggttgagatcatgatggcgcaggccggggcaacttttagacatcgcgccgtccaaccgcggaataggccggcggtgccttcttcacggaagatgtgcataaggaattttggtaaggatagttgctctggcactagtgtgccgggtgatgccgtatgaggggcggcgccagtatgaggaacatcgtccatatgtcggaaaacttgctgtcgcgtcttaccaacatcgaacggcgtagtaacaagtgctgctacggatcctgaaatgcccccggaaatgaagctatcaaggaaagcttggagacttgactcttcaggctcgtgatcagaaccggaaagaggggccttctgacgcgccgcgatcagaaccttctttacctcctcgtatccccaccagtagagcccagagaaaggaacatcgcgccacatggtaagagtgaaccctcgccagagagagctatatcccttcttctgcgtcatatggtataaatcctccacagtatttttgaagtggtccgcacccgttcccggagttgcctggagacgtgtccggaacatctccagcggactggtcgctgccgccgctgcgacacgagccaaggaccccgctatcaagggcgcataaccttcagacacccgctgtttgatgggactccgttcatccgtgcgcagccagtcatagccagcaaagtagatgacattggcggggattcccatcattaaggtcgggctcaaccctcgccacagtgtcaaagttccttcattgcgcgcgatcttccgtagtccgtctatagtcgatgtgaatgttcgccgctgcgattcttcgaccgcgcaatccatcgccggatgtggatttgttccgaccgcggtcgcctgcggccctagcatgcacatctgggcatcgtttccgacccagaagacttcgcgacagcaggaggtgataccgagatttggaggaaagtttttcaaggtttgggtggtgtgggaggtaaagcgtgaagcgttatggacctgagattgtgattgtaaacggactcggacgacatccaagggtgtcactggagctgttagtgctggattccaaggaccacgagctcttccgactaacctagaagcccggtcaagacattgccggcggtcgcagacaccatccgctgcccgggagtaatgttatctgttggaacaggggtcttgggcgctggaggagagcctgtcccggatgtagtggccattgtggaatcttcaaactgcgcggcccatgacgtctctagagaagctgttgagtctgtgccgaactgattgccagtaccgtggcctgaagcaagttccacgtgtggcattcaatcaattcgatggggaaacagtccagagttctttgagcttgtgttggaagaaaaatgatgcgtcaccgggaagaggaaccttggaagtttttcggggtctcgcgggtggcggtgggcggagataagcgttgggggagatttcggtgatttggagagatttggggggacctggaggggctagagggacgtgttttttaacgatttctgatcttgtttggcttcaatgagtttgattctgtgacaacttggtttggctgtttcttttagacctccttcatacggcttatcaatctgatctgatctccgaggtcggacatgaggcgaaacaggctatttcggctcgaccaaagggaagatcaatagtggaccttatgtagtggggtttctatagattctgaagagttgaagtatccatatttcctgggttaataggtgtttacgtatgttgggtagaaattgagtcggtgcatcgcctataacatgtatactagtagcatagaagtgaaacctcaggatatatgtggctagcattctatagaatatatcccttgctaacaagtggcattggatccaacaccccctttcgctcccattggcattcgaacgtgtactcataatttgagccattcatgttccagaagctctgcagccgactttcgatgccgggtcaattgtaggcattatgtcgaaggaagtcgatgagaatgggaatttcagtcaggcatcctcgtcgtgtttcgagccggtagattgaagacgcgcgcgcaagacaaccgaagctccagctcgagtagtatattggtgggttttagatctccatggaggaaatctaacccgagtaaaagctgtcgtgctatagttcttaccgcactatcccatcttcatattttgcgcatcgaacacaaggcatacatgctgtccatttggacctctgtgtttgaattgaccctgaagacgtagcataaagtgtcggcctccattttccccagcaatatcggataacctctcgagaatttctcgcttgaagctatcgtgcgagctagccaaccaaacggtagaacactacctatagcctagtttcctcatcactttgtatgcactgaaagtgtcctaagcgaaacgggctggaaacctccggtagaataaagtctggctcttctgttgtctggtgtgaatcaagagacctcgatgtttgagaaacaggttcaaagatcttgcgagccaagaccgagaatttactcgactcaaagccattttgaaagtagtcatcatcttgagatctcatctgcagtatttgtagcatggatattgtggatcgtggatgcctttaagttcccaaacgcaacaatcacatgtcgctatacagcatagtcagctttacttctttctcggtagtccatttggtaaggcagacataggtcctgactccaaattaagaacctagcttggcaatgtagccacacacgttttcattggctctgaaaagtgaagtagggcaaaatggctagggagtatacttgacggaggattgatgcgcaagttcattccaatgctttatattatgcaatatctcgtgttaaatacaataaacagtgacttgaagaggactcctatgtgaggcttgaaaaagccggggatgccaagcctcccgagatcggcgtgtgtcatcatcgcctggagatatcaatggatgcctggatgagaacgccctccaatcactacctcgctatggacgacaacgacgagcttgagtcgttccgccaacagtggtgcgaggaggtcactcgtcgatcaaaacccaaagctgcccctgctgctcctgcaactccggctccgactgccccgcctccgactcgtcttccgcccacacgccatgaggcctctgaccgcaaagagattgaggaggagggtcccccactggcttcatttgaccccgatgagcttgcgcatcaagtcggggaactgagtgtggaaccacccgaagatgatttctcacgccgagatgtcgcagagccaacgtctgcactggaacactttgaacgagcggtcgagaaggaggccgaaggcaacttgggagacagtctttcgcattaccgaaaggcatatagggtgggttttgactgctagaaatggcacttatgacgcaaatactcatttcaattcagctagattccgctgtcgataagtcctaccggaataagcactatgcccatgtatggaagaatccgaatcagcccgcgcctactacccctaccgccgtgactcaacagcccgcagatgtaccaatcctcccgacacctgaacttatcgcgtcatttgcacacctgccaatttcacagctggatcccatcgtcgaaaacacaccgccgcctccctgcccaatcgccactgtgccgtcggaagtgctagtggagattctgcgacatgtggcgatggacgacccatcagcctttggccggatggcactagtctgtaagcggatggcttaccatttcgcccatgagcagcatatctggagacggatctgtcaaggtcgggaatttggcttccagggcatgcattatgactttgcatgcgacctgcatggggaaccaatctatacccttgcgccgcgatacactccatttcccaagggcgggcctgtggaaatcccccagccgctgtcttcgtggagccaagtgttccagacccttcctcggattcgcttcacaggcatctacattagcacggtcaactatactcggcctggtgctgcatctgcgtacacgaatctgtcgtggaacagccccatccacatcgtgacttattaccgctatctgcggttctatccagatggctcggtcatctcgctgcttacttcaacggagccagtcgatgtggtccctcatattagcaaagagaatgtgatggcagcacgcaccccagcacaccgaaagaatcaacggcgtccctccgatgcgggtcatactctttctggagctactgatgcattaccacccgtcgccctgaatacgttgaagcatggccttcggggccggtggcatttggcgtcgcccgttgacacatcagaaacttccgacacgcccacccaagcctggaagcccgactcaacttctgatcagaaatcgctcctttccgacgagcgggatctcattattgaaacagagggtgtagaccccaagtatgtttatacgatgcatctatcgttacgttcctcgaccgtaccgaaatctgctcaagtcgggccagcttctcccaacccatcgaagaacaccaagctagcttggaagggcttctggagttataacagactgacagacgactggggcgaattcggtcttcgcaatgaccgagcgttcgtgttccggcgcgtacgcggctggggcttggactgatatgattgatgacttatacacgaaagatttgttacatacatggaaaatgagatatacatgaatttgaatatattgaatatcgtttcggggtttgtatcatccctgaagctattgagagtcacaagattaaaaatgaaatacagaacgtttcaccaagaaaaatgtgataagatattttccctaattgaaaccgcaagggatctcgagaatcgccagaaatatatcaacgcaggttgctcagaaactggcggaatcgtcggggaatcgatggacgtggcccaggagaagatgttcgttccgcgactacatggtaagcctgcaaggcattggtcttgaatgcatgcgtaccaccccacaagaacaggcgaaagatacgataattatgttctccccaagccgcgataagatcgtctttggacgaatctagacgctttgcccattccaacattgtgagctcgtagtcccgagtctcattagtaacatccagcaccgcaaacccgtggtataagagctcagcaaggacgtcctgaagagtcatgaaagtgtgcgtgccacgccaaatatagtctctggtaaaagagctaacagcaaacttctcaacagctgccgaaccgtcaaggtacatacggccaccgggcttcaacacatcccacatcctgcgtgcaaatcgttgataattagggatatgctcaatcacccctaatatcacaacatggtcgtatggctcctctgggttatgatcaagaaagtcttgtacgaagacttgaccagggacattcttctcctctataacacgctgcacataacgagcgctattgggcgcgatcgtcaacgtcgtgacatggactcctcgagcaccacaatactgagtcacaccaccccacccaccaccaatatcaagaattctcatacctggtttgaggccgagagaagcaaacatggtctccattttgtgctcagaggcttcttcgagcgtctcgtccggtcgctggaacaaaccgtgggtatagaaccggaaacgcttgtcaaggaaggagaggaagaacccgtcatcgagaccgtagtgatcaccgatcgccttggcgttcatcttggtcgcggtccggagaaaatcatacacgaactggaatttctgtcgcagaggcactttctcctgtagattttggcgggcgttgaacaaggcgcccaagtcaccctcaacctcgatatcaccagatagataagctcggccaacgcccatttctgtcattggtgtgcgcagcgcactctccgagcggaaaatcactcgataaactggctcgccgatgccgactggtatcactgcgccgttgggcagctgtatttcgccgggcgtctttagtcctgctaggagtgtggccacacccgtgcggggtagactattgcgagatgcttttgacattggagattgaagatagtgttaagttttggtaattcttctgatggtgatgtatagccacggggagatgaagtcaaatacgtccaggactagatttgtaatgccaacgacgaccataggagtatttgaaatagaagatcaggcagactggatatgtccatttagttgcaagagcacgcaagacaacctgcattagcggcagacagaatcagcctattggttcaatctcaatatctgacgtgtgatagtatctgtgtcaacgtgcagcttatactccgtgagaatgccgaagaggggtattatggatctattcacaataaaaaggaaatatacacatgggagattaaactaggattctatatctcctcatcttcatcatccatcatccacaactacaaccatccacacacccacttgaccattactcgcaaggagaggcgtgcaatggacccatcgattgcgaccgtcgggattggaacgcgttgtccacttgatacgcgcagtcacactgcgcccaactttcatagtttgtagtaggtcatctttaactgccgaggaactgccaatgcgggatagaaatggtgattgcagcatgcctgggatctggagggcaggcgacgtgaacagaatccggagggaagggtatggtcgaacgaggagatactgtatcatgtattatgttagtctgtgccatgaagtttgcaaataaacatctcatctcttacgttctcatacacgcccgcaaatgacatccggaaaaggggcgatttcatctcacgtagacggacggcttcagtctctctttctaaggatgcgtcgggctggaaccatgatcgcgggtgatgcggatatgcgaggctttgcataggttggaacagatttccaccatactgttgaacagcggagagttcccgcggactgaacagttcagtcagctcacggaactcatccttctcttctgcttctggtggctccgcaatgctctcttcgtcgggatcgcggtatttgttttgtagttccatcaaggattccatcgaggctccctccattgcaagtcccgagacatcgatctgtgcgccgatgaagtatttgacacggccgtggctgtcgcatagaggtgcgcactggagcaggttcatgaatggagagccgtcacgacgactggttatgttagttatctgggtgactatattggctaaaggctgagttatagagcatactagttgagaaacatttctgaatgatgccggcctgcgttaatagcttcgcgaagtcgacgaacactgttcgcatttgtcttcgggccttgtaaaaagcgacaatttcgaccaagcacgtaatccatgccgtactgagttgttctgtggaactctgattttgttagttcgattcggaaaacgagctggggaaagaaaaacataccttctgatgcgaaaataattggattgtcaggtcgcgatgggtctgtcaggcaaaatacttctgccagtgcattcgaagtcccgcgaaacttcattggcaaggttcctcggactcgctcctccacgatcttgcttgtgatgttgatacatctggctgtgatgaatgcagggagctcctcggcagtgagagccaacagcccgtctacaacacgccgctccaaaacacggttcaccgtcaccccggcggcttccccgtccgtccggactgctgggggaggcacatcaatagagaggcggacgagcgcattagcatattcaattgccttaagcgctttggaggcgttgaggtagtatgtgagggtagaaatggagcgcggccgctcttcgagaataaagtcacgaaatcgagctagataccgggggttatttaggattgtgagcatatgttcggacgaaaacatgatgtcggcaattctttccagcttgtagagtggtagatcgccgccatcgtagggcgcaatgagatcgtatgagccggtctcttcgctgacggggttaaactctggtgctccctcattcggattgatttgctgtagaagaggaagctcattggccgtcgcatgtcgacgcagattcttgatagaaggatttggtgtgggatacgcttccatctcttcctcgtgaattgcatttagactttccaacctcggtggatgggggaagttgtccaataattgatcagtcctgtcttgtcagcgcattcagtgaaacctaccaccttgagttcaacgtactgtgacaatcgaccggactcgctgacccattcgtggtattcgtcttgaatagtctcagtgaatgagcgcaatgactctgcatcgggggttcttagcccatcatggagcccctggaggccacggagatctgtatgcgacattgtttgagtaaagaaaatacgagatccggctgtataacgtcctggaaacagaccttttctttaatagtaggaaatccttccctaggcactggcgcccctccagaatgatacatcatttcatgcactctccagggtttcattacaaggaatgcaacggacacgatggaaagagtctgccaaagtacagagataatatgggaggtcataatggcaaaaagtagatcgatcgatggtctactgaactccacgagatcggagtcgatcgttgatcgatgatgccacagtgcagcggatgacctttggggatcagctattgaactttgggttgaaaacactgactggaattgcctggaattgcgatacatccattggattgttcgcaaataggctacggttggctagttcctattcgttgcttggataattgtttgacagaggatcttccaattcccccttttccctcgaaggctgcggcaggttttggatggtttgtttaccgccttggtctcgtctgtatactcagctcccttttcttcttgcagtcaaaataccagtccctcagagacatcaccagtgggaaagacactacaacggtgatgtctcggcgtggaagctttgatttcacggttcctttagattgacgcggcgaacagagaattagaatagtctgccttattatattcttttcgtatgctttatataggttcatgacaagacgtatgccgtatgttcgagtttcgatatatgaagagaagagaccgagaataacaaatcactgcaacaccataacccacaaatataaacaaaaagtgaatgaaaccagaaattactcgttctgtaaatgacgatgaagtagtatgcagcccatatatagcaagcgacgccccaaatgacattgccatctacccactccgatggatgcatcatgtgctctgcaagtatgaaagtgttcacacctcaccccaggtgccgagcccagctccaacaccaatgacactattgctttcgctgccaccaatatcccaatagttccgactagaacttgtcatcgtccgccggctggaaatagccgagagcttggcgctctggctggcacaactggagccaggccgccgatgcggtcgtacgattggcgaggagacacccgctgtgtttgatacaccggagaattgtgatgcgcgacgggtctggggttgtgatcgggagtaggctcgcgccacgagtgggtgatgttgccggatgatggcggctcggcgggatgcgtcttgcgcgcggcgcggtggggttggtgtgtgcgcttcattgggcatgtaacctcggcggctgaagcggttgcggaggtagcggaataccatcattacatcgagtccgctttcccaatactcggactcgtgttgaagctttatcgattcggagagttggtcagatcgctttggatcgtcatcttcgattccccattgtgcttcgtgctcccgattcgagtctcgaagtgtgggcgtgaagtgcggtgatagcatggaatcgccagttgtatcagcaacggttgatgcggtcgactcggcaggtttctgagaaattccgctttctgctaggcggttgagagacatccccgcatattcggcggatatgtctttagtcatttgataataggttgtaaatgccccgggatgttcacaaatttgatgaacaaggattcccagctcatgggcgatcgtttgaagcacctttgtctgccagagtggcgaatagctgaattctggctctggttcacgagctagtaccgtttccatgtctagtggatcttcctgtgggagcggttgcgcgtccagcggcaacgactcaccaaagatcacggagagcaaggaatcatcaatcccgatgaggtcacggatcaccgtgcgtgtgatgcggcgccagaaagactcttcatcctccgagacatctttcgacagtgatatatcccgtgatagcacctcggatacacgactttgtgggctaggatcaaccgaatgacgcaggctcgatcggctggtcagactagtccgcctctgtcgggtttctcgttcgatttcctgcaatagagcccggctctggtccatgcgccattcttcgattcgctgccaccgttctcgctcgacatttgtctcgccctcatcaacagtatccagatatctctgcacactcgagtgactgtgatgttgaatatggccgtacgagggccgttgggggttgtattgctcatgctgccacagctgatcctggactgcctgactcgaggcctggaaactgcctaacccgtcatgggccgggagcatggcaggcggcccctgatcgaaccgtgttggggaaaccggggctaggtctggtattcgaaaagcgtgcagtccatcgtctaggctgtctagttcggttccatcttcgtccagttgatcgtcgagggcattctcgtcatcggcttctccctcggcgccgattccagagcgggttgcagcaaaggagccgaagtcactcagccgagaagcacctacagtacgcgtacgatcggttgaagtggtgtgtgtccgagcggtcggggagaataggacccattgtgcggtgtcgtcatcgcgctgttccgacaaggaggaggggatgtcgagagtaggtggcggaggggttgaataggaagttctgcggcgggggacgtgtgttgggacctggaaggccatcttgttgatttgatcgcagccaaagtagatagatagtacgataagcgggttcgatggtggatccagagagagggggagttaaggctgttcaagcggggattataagcattaaagtatatggaggagattggtataaataagaggaactaagaaaggaggagtagaaagaatccaagtccaaaaacaagaaaggacaagcttggaagagtgtcctggtgatgtgagggagggagattagctgataagcgggaagatgggcccgcgggagcccgagtcgccctgggatcggccagtgatctaccaatgatgcaaccggtatcggaatggtgagaccagttgtgtatccgttctgtatcgcgcgtagaagaggtcataagataatgtagagacatgttgagtatattacaatattgggtacggagaagtgaccctagtactatggcttgaagtatggcaggtgcctcaaggagtataagcaggcagaataagatcactggtcaactccctttagaatcactttctttagaatcactttctttagaatcactttctttagaatcaacttcctttacggagtagattaggaagtatgttataaagtaaagtgttgttgtcgccacttcagatgccggataatcacatgatctgttgttatccattgggtcacatgtctttcagaggtatagaactaaactattgcgaacatcggcgtttttgaccttcataacatcggtccccgattccttggccacttggcagaagatggtcgtgtgattggattcttgatagaacgtatcaagaacgcccggcatcaaacaccgcgatacaaactgatgcagctttctcattcgtgattcaacggctattttacaaattccctagcggatccatcacgtccaggtgggggagatcttcttcaaataatttgttgcctatctttagggtgttgatatgtagttagttagttaactagttaactaactagttacggagtagttacccccttagataatcgtacccccgaaaatttaggcgcaccttcctaatcgggtatagatattgtcgctctccttcttaagttaaacttcccagtagtaagacagaaggtacctacaatttgtatgtaaactcctagcaaaaataagtcactcctaccatatcctcaggtatcaactacttcactgcttcatccttgcccttgctgatgggagcttcattctcttgttcgcaatgtctaccacgatttccatcaggcacttgcgaccgcacctgagtagggggtttgcagatttataccgaaaggacagatggagagaagtgaaagatgcgaatttgaatggtatcatcgctcacggggtatatattagactactataatatagcatctcgagccgacgatcaatccttcccagctaaggcctctccgacccaatccatctgcacagcactgacaccacgcgcgtaactacggttggtgaatacgaattcgttgtacatgattgcctcgagctttttgccgtaaagcacactagacgggtgaatggcgacggtttggtttccaacgatcgtacgataactgccatcgggcacgagacgagccgtattggtcgcgaatccagctaggaagctctggagaatgaggatgggcgaggggtcgtgtagtgaggtattgttcagggcttcgttggtgagcagcttggcttgtcggcactgggtgcggagttgcttgcggacgtcctgttgtggcctcgttagtttcatatgactgctgtccaatcatgtactactcaccatgactgattgcatcgcccggtgggataccaggtgtcgctctgcccatgctttacggtcggcgtgttcagcggcatacacacgaacggtcgtcagcattgtgaggtggtcaccctcgcgccggtatagatcacgacgggctgcttctgctgcctccttcttttcttccgaggtggtgttcaaaaagatgttctccacactgagacatgaaataatatcaataacatctagcaaacattcaggcccattttcgccagctgccaacagtacacgtcctagagttggagtcaatggtagcttggcaatatgtaggccgacggcgctgatctttccatcgtcttcaagcgcattaatgttcaatagctgcagaagagctttctcgagtgcttcgcgtggtggccgcgtcaggaatgggaacccaacaatgtcatcaacgccacgagccttcatgttcagtagggcttggctcagatcacagcgcagaatctcgggcgtgtttgtctcatccaaggccagatagtctttctctgtgtacaagcggaaacattgaccaggagcctcacgaccagctcgacccttccgctggattgcagctgatttagagataggctttactaggagcgagtcaagaccaagacgagttcggaactgcttgactttggccttgccgcagtcaatcacgtgccgtacaccagacacagtgacagaagtctcagcaatattggtagatagcacaactttgcgcgttcgtggtggagcaggggcaaagacccgttgttgagcagcctgtggcagcgcggcgaacagaggtagaaccaggatcttaggaagtgatgggtccatacccatggcgtactcattcactaggtgttccaatgcctcgacggtttcctggccagtcaggaagacaaggatatcacccggcattggttccttctgatgaatctgaaagatgattttcagcgctgcatccacgaagtcatgtactggcgcgggggagtagatagttttgaccgcaaattgtcgacccttaatacggcagacagagatatcctttggactcgaagtatccattttgtcggcttcagcctcgactccctcaatagccttctgttctggctccggtcttttgaatccttgttggaagaagtctgtcaaactctccatatcagccgtagcactcatgacaaccaccttcagcggcacaccacctcggccctccttctttccagatacaagattacgcaggaatccaagtgtcagatccacgttgatgcctcgttcgtggacctcatcaaccacaatagcgctgtacttagtcaagttgggatcgtgcaacatctcctggagcagcattccctcagtcaagaacttgatccgtgtactaggcgatgtcgacgtatcaaatcgcacagagtagccgactttgctggcaggcgagtgcgatccaagcggtgtacccatctcctcggctacacggcgggccagcgaaatggcagcgactcgtctcggctgcgtgatagcgatgcatcctccgaccattttcttttccgtcttcccatcccgcgtgatttgcgtaggtacgggccgacaccagaattcgtctaccaagaactgcgggatctgcgtactctttccgctacccgtctcaccgaccaacagcatcacatcttgttcccgtagcagatcgcgaatcaaatcagcattttcgaatacggggagctttcgccgtgtctcgaggagggctttggccttttctcttaaaggagtgaagttggttttggtatcggtgaaaggtttggacttcgacttcgggtggaattttgttgttgatgggccgtttgtttgagatgctgcatgcggccatttttttggaacagagactgatctttctacctccttggcagatgcagggatttccctcggttcatcttgatcggcggggttggaggcttcgggctcatcgagcttgcgcttcttgtttctcttcttctttcgctcgggtccttctgtgggttgagatgaaagggtttgctttaaaatcctctcatcatccgactccgcgaacacggtgcgaaccttttctggcattttgagttgagacgcgaaagaatgttcaccaggaagctcgaatctgaaatttttgccttatcgataagataagctgataaacattctccttatcaacatcatcagccctagttaactagcggcccttgttattcatactccgatcattttactttcgtggcatcgtgacacggcacgaatgagctgttttaaatatatactataagcaaagaaagtaaattatgtggtcattcccttgttcgagtcttttgactacaatatatgtaaagtagaattaggttggcgaaattaaattgacgcttgatcagtaagacaaaataccgaaaaatctggcgtaaatatcctcctttagtacctttatttgctacctttcgctctttgcttacaaccttggaataattaacactatatgactttgattttggtatccttgaacagagtgctagttcatgatcgtgatttatgtaaagctctgtgatggaaaatcgtgcagcgtattttaccacacgactataacaaaaaccaaggtccctgtttaaggcctagaggggccatatcccattctgacactctggcctatctaaaatttggctctgctggaggaagagaaaatccccgtggtctattctattcacgccgagtcgcttctatggtcttctccgcatcaacccgcccttggactcaagatctttttttggttgtccctgcttgatactcttccactctagagtagtcgcacccagtagtgtcagacacgagagaatcaaaccgacctgaaacaccttcttgagcgcttcgttgtaggagtagagaaccacgtcgtgcagatgtgccggcattgaattcagcagctccgtgacaccacccgaggtgacaagacgggggttgaaccccggcagcccggaaagtttcttcaccagctgattggccagaatattttccccgacggagacaaagatagctgccccgatcaattgaccgaacagcatcagtgctaagccagagggcacgtcgggctttggaagaacagtttgtgcggcgagatttgggacttggaaacacaagcccagaccgattccgtagacgatctgataaccgatccattttccttccccggtatctacctggaaagtggtgaggagaccggctccgacggacatgatgcaggatccgataatggccaatggagtgtagtatccaatcttggagtttatgattccaccactgattgagccaacaaccattgatatcatcgtcggtagcagacggatgccggattccacagcagaactgcccttgatggattggaaccagattggaaggaagtacactgtgattgaagtcagtaacatgaaataatgtttgatagtgcggtttcattaccaaagatatagattcctgatccgacgcagagtgtctgccagaagcctgaaatgatgctgcgctgcgaaaagatgcgaactggaagcgtagctgtcttcggaagaaagacctggacgacaacaaaagaaataagtaagacgctcatgacaaccaggcaagccaccacgcggctactgccccactgcaaaatgtcagctatagttggaaataatggtgtacgggacttacagcatacgtttggcctccccattgaagtgccaatatgagacagaccacgccagatactagaaatgtagtgccgaaaaaatccagttgcagctttttttccgtccaggagacctttgttgtatcctgcttggggacctggaggcagaaggcaatgaagacgatggcagcaccaccaattggcagattaatataaaagcaccatctccatgtcaccttcgacgtaaagacgccgccaatcaagggacccacgacagaggcgatgccgaaaagggcgccgaacagtccttgaatttgcggacgcttctcaagaggaacggcatggatgatgcacattatctaagtgaatcttttgtcagcaattggcacaaagggtaggggctagaatcaacttacagttccagccagtattccagcagcaccgactccacagattgctcttccaattatgaaggcaactgaattcggcgccgctccacaaatagcagaggcaaactcaaacactagaatactgacaaggaagacaattctgacagaaaagagcttgtacagcttgccgaacaggagttgaaatgcgcagcatgtcaacaagtacgagcttccgtaccagccaacgtggtcgaaggaattgaattcatcggtgattttgggtatggcctatcaattgcgtatctctcagcgctagaattagactgaattcaatgtatcatgatcataccgttgagataattgttctgtcaagcgcaactaggaacatggcgacaaaggccgagacgatgagacagacaaccctaagggtggactggttctcaggtgggcccgaaggacctggagagcctccagttttgcctggtgcgacatctttgactggtgcatcataatgttcatgcaacaactctggagcacccattgtagccgttttggtgctttcagatgtagaagtgcgtagtggagacataccactaagcaagatgcgaccgatcggttattgatgcgcgagagataatcttgtagaccataataaataccaaggaaagctcccatatttaaaggggcccaagggacaaaacatggtcggcgatttcgcattttgcagaggatcaacaagatggtcgggggttagtaagtgcgacggttagcaagtggcgttgcttcggcacttataaaacccgacttccccttcccggtgtttctctcagtcaacccaggcttcggggtctaggctctattatttgacatctctgacgcaacaggataatctcaggtcatggcgacgccaatctccccatccgagcacacagccgccgtcaaggcccggcgcgtgctggcctgcgtgctgtgtcagcaacgcaagatcaagtgtgatcgtacattcccttgcgccaactgtgtacgtgccagcgagcagtgtgaacagtcaacccgccagcgacgccggaggtttcctgagagagagttgctagcgcgcctgcgacgctatgagagcctgcttcgccagcataacatcgagtttgatcctctccatacgcctactgcaaaccgtaggtctcccagcgaggatggccaagatggacttccagagggtgcccactcagaaggtgctcttcgtgatacggattctcgcccgtcgagagaaaagaaagcagtcaagcctaaatccttgtatgaaactcggtgttattcttctcgtgaaacatacttctggatgactaatcagtagtaggaatctctggcatgctatgaatcaaaaggtatgatcgatcgcctctgtgagtaattgtgggctcactgacaattacgaaagactattgatcccaaggatgatgatggaaacgacggtgacgacgacgatgaaaacgacaccgggttcctccacgacaatgttgatatacgccacgccgtaatcaagaccgcatggaaccatatgttccaaggcaaaagcaacgaccacttgttcttcggttcaccggcagggaacatcgatgacctttctgcttcgcatccgacccaggtacagatcttcaggctttggcagatctacttggataacgtgaaccctcttcttaaagtaacgcacacacctacccttcaaacacgtatcatcgatgctgctagcgacatcgccaatgtcgatcccatattggaagcattgatgttcagtatctactgtgtctccattctgagtctcacagaagatcagtgtattaccttgttcggatctcccaaaaaggatcttttgaaagcctatcagtctgcatgccagcaagcgttacggagttgttgtattttacgttccagtaaccgtgagtgcttgaccgcattgtatctgtatctagtaggtgtgtccaaactttttgtctacactcactgatttttgcaggtgtcgaccaggcctgacacggaccctgtatctctctcatcaatgcttagcgttgctataaggatcgcccagcggataggcattcataatgagtcgttatacagtaaatgttccagtctcgaggcagagatgagtcggagactgtggtggtcgctcattatctttgataatcgcatctgcgaaatgtccgattataaaaccacgtcgctagctcctacctgggactgccgtattcctctcaatgttagtgattttgagcttcagccagatattagagccccacccgcaacaagcaacagaccaacagagatgctctttgctgttgtgcgcagcgagctcgccgactttgtccgtcacagcaccttccacctcgagtttaccaatccgtttttgaacacgaccgcccgccgatctaccaccacagacgagggggagggacttctagcgctcgagaagatgatagaggagaaatacctcacattctgcaatccagagaacccactgcatttcatgacgatgtggacaatgcggggctatttggccaagaaccgcctcttgcaacactactctcgatacttggcgggctctgtgcagcagacagctacacagcggaactcaggcatctctcacgcactgcgcatgctagagtgcgataccaacctcatggcatcgtctctcaccaagggatacctgtggcttattcacttccacttccccttccccgcgtacattcatatccttcaggatctgaagaagaggcccatcgagaaacacgcagaccaggcgtgggaggtcatgagcaataactacgaggtccgcatgatggatgctaaggaggaggaccgccccttctttatcgtcttctgtcggattgtctttcaggcttgggaggcacgtgaaaaaatagcgagacagcaggagacgcccctagtgccaccgcggattgtgtcggatatccggaataaagtaatgcatatgatatcgaatttcggacaagacgcggacacaatgcagcccggtggttccctaggttccaatatgggtgacctgtcgatgcctactgagatggatttcagtgttcctggcataacatatggtgctgactggcaggttcccacgagtttgggaccgtgggggtatcctgagattcctgggccgaacttaacggacgtggatgtgaatcaatttcttttggacacgatggagtggaatgggctgcatgtacgaacggggtgagaaaaaaagaaattctcattcgagatgagaattatgcgatttttgtacctgttgagttaagaacatagtcaattgaatctaggggacctcagcttgaacgtgcctcggatagtataatgtccgagctgatagctcgggagttagcatgtccgttaagtggagctgcattcctcgctgtgattggcttgacttgagcttggatgcccagaaagccaaggttggcggcgccacggatccacccgtaccacatcgtggcaaagtcaattgtatacatgcggactccgaacccggctgcctgcaattctctataaaagacactccctatgtcttcatatccccatcagctatcagagtcatagttttacttggtacactaaaatcggtctttcaaattacaacttcaagcatgtctatccgagccctcaaccagaactccccctccttgaactttgccgccaacgcggagggacagggtccatgttgccctttcttccgtcctcacggaggcgagtatccttactccaacaaatggtatcttcagtctggcagcgatcaacccggccacccaggccatccttacttgtctccgtgggccgaaaccggcgacaaagaccaggacaatgaagccaacgacaacagctgggataccaccaaccctcgcaagccataccaatgcccagggcccgcggaagtttatcctccgcacaactttcctagcgcctctgaaggccgcaagccttgccctttcccgggctaccctcaacagccgtacacctacccagttctcttccatggtatcagtcacatgcccatcccggccctgcggagtgtcaaaagccatatccttccctctggaatgacgagaaatcccagccctatgctcgcaagccgttggggttcttgttattgaggtgccaaagacagagccggatgatgatgccgaggctaagagggttgaggttgagtaattagaggtttggtatagataaaatagtcagtattaaaaacttaggcctcatacacggatcttcctcccatgtgtagattatcaagaaaatggaaatttcgagctcaactaatccccagttgacatatatttgaatttttcacctaaggaccaacttatttgattatgaaattgttcttaataaaagctagttattagaatggtctggacagtgaagacgggaataggtcccgggaggcccgaaccttattcttctaaccaatgagaattgatattacataatgattcccatcacagacatcgagcaaaccgaaggataaaaaaatcagtcacgacgaaaatggtattacggccacatctgacgagttagaggagggaccgacaaaacggaagttaatcacaggcctgccttcaaattaaaattctacctggcttaattcgtgacgattgcggagcaaagcgaagcaattaaatcaacctcgttgttttctcctatgaatcaatgcggtgaaatatcatcggccaactttggcagaataatccaaccggcagaatgaatatagattagatggatatcgcagggtccgcctcgatagcacttgggaggcatccaaagcagccgtcaaagcattgaaacatggaatccaagccctggctgataattattatttcaagcgtattacggactggcctgcttcttggatgcatccgagtcaagcgaaatgaagattctgatatggaaaaatccagaaacatgcagataactgcccgtcaggtactctgagagctcaaagagcgaaaataactgataaattgaaagcatatatccgttttaagaccatatctagtcttataatttcaattagtatgagattacatggcgataaactcatagttgagagctacctaattaggcttagtgcccctcgatttgcttcctagacttaccgcccaaggactagtactatttatcgtaattctgccgatttcaaacacgcataatctaaaatgccaagaagccacgtgctctcgggcaatccctccgctttggcggggtttgtataccttcatttttgctatggtgtaatggtaagatagtctgtaatttccctaccaacttatctttatttctatgtatttgtcgatagggtctctcattggaaaatgtgagagccatgccaaagagtaaagcgtccgcgacacgtgatatatcaagtgcggggaagataagaataaggtttataccattttaggcctagtgaaggggctagtggcttgataagacgtcagcagctgcattgagatgtggcattggcatattggaagaggaaagtcaccgcgaaagcctgagaaattttttgcactcgaaatggtgtcccacatattgcagctccaccaggaactgtggtctcacgagtcacaatgtaatcctataaagatcatcgagagtcgctgaactgaagacctggatagacaacaacaagacagagattccttatcttgattcccccgctgacaatcttacactatgggatctatcgagatcatagaacagcagtacgatgtccttatcatcggtgccggtctttcgggtatctgcgcactacacaacttccgaaagcgctttccatcgtggcgcgttggagttctggaggcagccgacaatgttgggggaacttggtattgcaaccgctaccctggagcacgagttgacaccgaatcactttcctacgcatattcgtgggacaaagacctcttgaacgaatggacctggggggagtctttctccacccagtcagaggtgctccgttatattgaacatgtctgcgacaagcacaacctttacaaaaatatccagcttaacactcgagttaaggaagccgtttggcaggaaaagaacaatacttggctgtttcgcgacgaagtcggcacccatcaccgaacccgtttcttcgtcagctgcatgggtttcctctcaaccccgacacttcccgccattccagatattgaaatgtttcaaggaaaggcattccatacctcccggtggcccaaagactttgacatgaagcgtgatctggccaacaagcgggtgggtgtcatcggcaccggcgcaacgggaatccaaataatcacagcgatctcaaaagaaccgagcatcagatcattgaatgttttccaacgcacggcaaactggtctgcgcccctacggaacgaggtgattaggcccgagcagatggagcagcaccgcaaaaactacggtgccgttttccaactctgcgccaaaacacccagctgcttcatgcaccaagccgacccgcggaagtccctggaagtatctgcagaagagcggttggagctttgggaagatatatatgcaaagcccggttttgccaaatggctaggcacattcagcgacacatataacaaccgtgaagcaaacaaactgtactccgattttatggccagcaaaattcgagccagaatacatgatcccgaggttgctgacagcatgattcccaaagatcatggcttcggcacacgacgtgtccctctcgagagtggatactttgaggcatttaaccagcctaatgtccaccttgttgatctcaagaaaacgccaattgagagagtcacgaagaatggtattgtcacatctgatggcaaagagcataaattggatgttttgatctatgcaacgggctttgacgccattaccggtgcattcagccccattgattggacagggagaaacggtcgccctcttctcggctttagcaacaccaagcaaggcgagcaagcaatttgggttgatcaccggccccgtacatacttgggcatgacggcttgcgatatgcctaacatgttcatggtcctgggtcctcaccaaccattcggcaatgctccccggactatcgagcacgccgtggaggttatttcagatctcttacaacactgcaaagacaacagctactcctatgtagagccgacgggagaagctgtgaatgcatggacggaacacgttgttgaatgcagtaaaggtgctttgtcaaacgaaatcgacagctggatgaccggggttaatacgaatgtgaaggggaagactgttagaagtgttgcgaggtacagtgggagtgccgtggagtatcgccgaagatgcgctgagtctaaggcagctggttggaaaggtttggcatttgctcaactgtcaagttccaagctttgatatagataaatacttatcaactatcaccattgaacgtattgtttacactgccccataagcataccacaatcagaacgaatcaacctcagtcagaccccaaactagacaataaactggcagaaggagcaaagaatgtcgtcccagtaagcggcttcgagaaatcaaggatacgatcatgcaggccaggaggatcgccaataaacatacgctccatcattctttcaatcacccaaagacgacgagtatagcctatgaagtaagtcccaaactcgccagaaccaggagatccaaatggcatattatcacgaagaatatcatgctcattcccatcttcatcttcaaccgtggtgagtgtcttgtgagagcgctgacccgacttggcatcatcgagctcaatattatctattttggtgcggccgataatcctttcctgctgttccgtcgagagatctttccatccaggtagatcgtgactgtacttctgtacgacgatatagctgccacccgcggcagctgtatcttcctctgcaaccagaacggaagccggaaccgccagtccaactggattagccgtaccgtccacaaatccaagaagatcccggacatcaaagtaacgaaaaccgacagtctcatcgatgacggagaccgagtcgccgagttggtccagtagctgccgctcgaattcaaagcagatatctctgcgctccgagcgaatgtggaaaagcaaatcaccgctggtcgagaccgcggtgtgtttttcgcctttgacctcacggaaagggtgcagctctgagggtcggggaaaccccgtgagacgatcccagatgtcacttccaatgccaacggtgcatgcaaattgggcgctgaggtcgcggatggatacatttttggccaggctgtccacgcctgccagtgtagagcgcacgttttcaatggcattggacttgttggtcacagagagaacaaggaaggtagcgaatttcgtgagcggggcgtctacacgctgaggagccattgggacacggtgggtgttcatatttgctttttgatatgacttggaattgtaacaggcagatatgtgttgtctgcggaatgaacgcccggtgaggctcgcctggttggtgaaatgccgttctttccagaatgaactcctggaagcagctcgaaaggtatttgaatgaccaaaccgagaaattgataattgaagacgaatgttgggaatattagagatgaccagtctcccggacttggtcatacttcagctgctgacagtctgtggtacggagtagacgaagctcctcatctggtgtgagtgcatcaactgattatattcaggaagaaatgattggacaaatcatgttctaaaaatattggagagcgaagcaagaaaccggtcgatgtgacattgtcggtggtgacatcaccagccggaccgcggggaaatattacgtgtgtctctattcgttcatgattttgtagtaacttgattcttgcagatgttattcctataaacaaatgcgaactcatcgctgcgtgtacccaccatccacgaataaagccgtcccagtaacaaaagaagcccgtccaccactcaagtaaacaacaccgtcggcgatctcctccggccgacccatacgctccattggaaccgcattagcaactttctcctgcatagccgcgaagatctggggcgacttggtcgtcaacggggtctcggtatacccaggacagatagcgttgatgcgcaacccatcctttgcataatcctccgaggcagtcctcgtcaaaccaataaccgcatgcttcgtcgcagtgtacgcagtcgacaacgcaatcccagcgacgccctgaatagacgagaagttgacaattgagccccgctgcagtggcctgccatcaatcgaagaccggataggctcctgcttcaacatgatcttggcagcagctcgcaaaacgaagaatgtacccgtgaggttgacgttcaagatacgctcccaatccgatgtctcgcagaatgcagctccgcctgcgtgcttcattgcgattccggctgcattgacgacgtagtcgagtcggccgaatgtcgtcgcgacttcttggacgacatggttgacgcggttctcatctgttacattggtggggtaggtgatgacccggcatggctttaatcctagtccgcgctgttgttcttcgatctcggctttcacagcctccagggcttcagggccgatgtcgagtagggcgattcccgaggctccatctctggcgaatgtctttgcacaggcgcggccaatgcccgaggctgcacctgtgataagggcaattccagatacatccatttagggtggtttgcggggcttaggatacttgattgatctgctggtgtgcgtagccggaagggtgacggtgggtaaatggaacagagcaactgaatattgatggtttatatagtttcccacggagagacttgaatagacagcgatgacagcccagtatctttctccaaaaagactactttgatgcatgtggggttgtcgcggagacttgcctaactcgcgtctgatgatagccgtgcaacctatgacaacgcatctcggacttgctttcctatactgtagggattatttagtgtaaagacacgtactgctgctgatacatacgttcagtgcggtggtgttgcagctggttgtcaccttggattgagagcggatttcatacaccaagtgctaacattcaatttaaaatttggtactagaattgatcaacgatcggtaattgttgaatcattttggccttatttaatcatgttctattgctctacgtatggggatatagatatccaagtttacagtaatagtcactgaccattgatgaacaagtttataggtttattgcccacggtatcatattataaatcaaaatatctgatgtatcggcatggagcctttcattaaatccaaccaagtgacactcttcccgttagcacaagtcttctcctgccaaattcgttgaatattggccaatgtttcagtgaagcaagacaagccactacggcgtgccgaattcacaaaccagttggagaatgatgcctgaaccaatggatcgtcggcctcacaggccgcaataaacgcaggccagataaatcctgccgagccatgtactacagtagagtccgtgttctcgcagcgtagtagatggtccaacacgaccacgaccttttgctgtagcaaggaagcatccacgtcgtagattcgacggtagaaatatattgccagtgcattttgcatggcattgagcatattgtctatgacttcgtggtcgaattcagattggatattctccaggctgggtagtggcagcttgttgatgtagtcttcgagagtcttcgcccggctgatgaactcttttaagctgatgcagttcgatgcatcctctctttctgccgcgtccttttccttccctaatcgaataacttgggatagaagaagaacccatggttcagggataccaaatatctccgggtatagggtgttagaccagaagccaggtctttcaagatgcagatcattctcgccttcctcttgcccacgcactctcatcatttcttggtccagattcttccaacccgataagcgaaatgacagactgtcgaggctgtagtttccaagcccgctggtttcaatggctgcgtgcacgtgatgacgctgtcttgagttcgctccacaaatgaagacactctcatggatgatacgttcaaatacatagcagtgatgtagtaatcgtacttttcgagactttttgcgcggaagtcctcttaaacgaatgaacttttcagcttcaacgaaataatactccgattcccttcggctccctgagaacatcgtcacttggaccatggtgagcaatgccatcaagattgacttgtatttggctactttcggaaaattgtaggcggtcataagcatcattttcgcatgttgctgggctttttgcttgtaaattatggccttctcgctccatgtttgggatcgagagactcccccaaggctgaatgcacttatggctaatgtcccgtagaaggcacatagactggcatcactcatgttatcaccaagaaccaagcccgcgaggcagctcttggtgtgaggtataaaaagaatgtgccagggggttttagagtgtcggaggggcgtcatcaggctaattacagccgaagcatagtgcttgagaaggaacacggcatcttggggcagggctttcgtggtacccgttgaagaagtaaaaagattaggtaatattggatgattgtaagactgatctggaagacatgatgtgggtaaatatccatggggtactggatcgtcttccacggaatcttgatctatcatggcgtctaaacataccagggaaggcggactgggaacatgctctggttgatcaaatgtgaagtgcgttaaggactgagaccaaggcgacagaagcatgtcggacgaattgctgaatagaaccacatcttccggagaactggactgtgtctcttcaaagtcgttcatagctggttcacgcggaattgtgtcttgaccttggtttgatctaaacgccccgaatggaccttggtggatctcgatttcctccgaagtagttgctctttcgcattcttcatcaatttgggatagaatatgatgggttttctttggaggagcgcttgagacaagccactgactcatgcgttctctttccttcactgtaaacaatggtcgacgaaaccggaccccatgattgcgtagtgagctctcaaaatcaaagaagataactttcttgtatcccccgcaagctaagccaaaatattgacacattgaacattctggacgtccttcgtcgcatttcacatgtctacttcgacactattgtgtaggttagatatgcattatcatgactcaatgagatcggcggacttactgtgacacaccctgtgaatgagcgcgtatgggtaatggcctcgtgtacaccttcttgaggtgaatctgccatctttcggtgtttgaacaaggaaagtgttgtacaggagtctgcgggggaagtggatcggtagatcgccgatagcggaaacctgcctgtttcgacggtgcgcggtcactttcctattaggttggactatctatgcagtagttgaaggtcggaatgtcgctgataatgtgtaattctccgtgtttccccgcccactgcattgggatattctcaatgggcttgccgatataatgaaaatgccctaaataaggctatcccacaacatccgtgttgattagttccctttcgctcacttcgtttgtttcagggcatatactttcgtgtctagtgacgacctggcctcttgctgtaacagtttctatttagcctagctgctaacataacatctcggtcattgatttatgtcttagtagattgaccaacattcagtcgatctttatcccgactttcccaaaatgcctttgctccgacatatactggtatgcacttttgagatcctcgagtctgaaggtcttttgatccatcacaggatgaatattatgcgcctcgactgcgcggttcatttgttcaaactgagcacgcgagcccactacaatgctttgaacagtgcacttggcgctaaatgactccagcagagtaggctggtccccggatttactaacgtaaccaatgcccgtaatcaggccggcgattttgatagccgccagggactatatagagatgttagtggattgttcggggtgtaattgaatcaaggactataatttcatacctgtctcagcgtacctggcccaccgacctcgagaatgtgagagacacccgccttttcaggtgtaaggcttttagcagtctttccccaatctgtcgtcgttttatagttgatgacatggtccgcaccaagctccttcaatcgtacggctttctcatcagatgaagtagtcgcgattacggtcgcgcccgcggcttttgcgaactaaagggaacatggaagtcagtttattcagcgggatcccttgagcagtcgtcgcaattggtttacctgaattccaaaaagactaactccaccagatccttgagtcaaaacaacatcaccaggtcgaagagggtgatcagcgctgccgtaaagtgcattccacgccgtgaggcccgcgcaagtcaaagtgctggcttctaggaagctgaggttcggcggcatagccaccaggccctcctcggagaatacaccgcgctgtcgaaaggtcccgtctaaaaggccaccaagcgcagttttcatggagcgctggtcaagggggccagcatggtggccctggttgaacagcgtaatcaccttatctccaacatgaaaacgagacactcgcgatccggttgcctccaccgtaccggctccatcagatcctggaataatattggcattggttgggtagcgatattcaccctgtacgagttaagtgggtaaaccccagtggtcgtagctctcgtcctggacttactgttgctataatcaagtcacggtaattaattgaagcggcgtggactaccagagcgctagggtcagtattactttcaatcaaccgtcggatggattgtcggcgtacatcggactaggacatcgtttgggcccaagtcgggaataggaacatttttgctgaaatggagaccgtcgaaccctgtctgtttttcgaccctccattcattcgtagtaagtgagcccatcttgcaggtgatgatttagcgagaacaacaaaataacatcttaaggactacattcagttatagatccatccacggacctctctggtgctttgtaatctgatcaatgacctcgttgctttgtaatagacgggtgaatacggcagtcgaacttggtccaatggggggcttacagctgatcgaatgttcaaattggcatactggcctgcgtttgacctccccgaagtcatacacaatgtatactcagactcttggatcgcgtgggcgaaggttacctgtcccaaacgtcaatgacgaagacaataatttatgattgcggtccgctaaaaaagaaacaatatacgtctttgagcaagatttgcttgatgctggaaacacatcgccagaagatatgactctggatgcactgcatattgcagcggagaaggacacatggcaatgatccaggtctgtttagagcgcacaaagatgaatgacatgatggtgtttgagggttccctccgctcaaaatgcacatagtccagtcgcttgataccgacaagctcaatgtcaactcacaggactccctccctgcgttgggctcctttgcatctggctggtatgaatggtcattttgctgctgtcatagcacttcttgatcacggagatgtagaccccaatgctgctgatgaagaagaatggactctggctttttcagtctttcgagagaaaccatctaagttgactttgccgaaggacagaccggtttttccacctggttgaatagatccagacaaatgggcacctaacgcaagtcggtaattcagtgaagctgtctacgcttgggtcacgatttgaagagagaagtccgtcatgcatgctggatgtttcagaaatgacgaggttattgattttctcattgccaatataagtctctcgaacatagaatcatgaattatgagatgtcccggcccaacattgtcaatatcgaacataacacaatgatgtagccaaggccttttgtaggatgctagaatgaaaagaaacaggtgtatgtcatcgatgcctggaaacaaccaagtcgggcagacgaaaaaaggaaaagccataacgcgccaggaccagccaggaagaaaagcgggtgaaagatagaaagaaacaacagtcaagaaatgctccaatcagggcgaaaacacatcgtagcccccccaacgcaagacagagttatgtgtcccatttacatctgtctcaatccctctgcaagacgccgcttgccgaactcccaggcgttcattagaccttgttccgtgagatcgatattcttcatattgggtgcatctgcagccggtgcgcggctgacacgcgaagcgatcatgaccgggtcagtctcgaggatgattccgtcgtcgatagtctcgtcaatggtcagggagaggaggtcgtagttctcaacgatagtgcgcttgtcggttgcgcccctgatgagcgatcctgttagcatcggtcgaattcctcgaattggaatcgaaacttgacatacttgaataagatccccagagcatctcgtagtgacagtacaacattgtagagcaggacctcgttctcgtcggcacttccaacaacgtaaagcatgacgtcgctctccatcttgaagaccacaatgcggttatcgtaaaggatgacatcgcttgcggacttgttggtcttctcaaggaggcccttctcgaaagaacgctgctccttcacggtagggtaggggttggcaccggggtaatcagtcgagtttggtgcagcgccggcgggggggtgtggtgccgagaagtactttgcgtagatgcgggacccatcgtcagcggacatgacgaggaccgcatttacggagaacagggagagggaaccgggcatggtgagttttgtggtgggagcaattggggaaatactgtccttgtgcttgttgatgctctcaaccgccaatctggccggaggcggagacgcactaatgttgttccgtcttcgagctctatactccgtacggatacagtgaccacagcacagcgtaagtgggaatgaatccacacttacggagtattcatctctgacatggtactaggactcagtcggcttcgggttacttgtttattaatcatttgctacattgtcggtacgataacgatatagttggcaatataaccaaccattcgttggccctaatactacaacggaatactagattaagttacacatctcaagattggggatatgacataaaatgagtggaaatacatcattgtgaaggatacatggggaataatatatatcaagataaagatcataatgtatgagactcctttcgaaaccacatcgcatggggaaacatcatgatcagatcgcgttaaaggaaacatgagaaatcagggaccttgaaatataggcaaaacatttcaagacatgaaattgcgttatgtgcatcataggggggtatgggtatgttaaaaatatggtcaaagaccaggttaagatcacatcaaatcatactgcccggagaacaaggcctactgcggcgctggttcatcgccggcgcgattcaaccacggaatccaactcgcgcggttcgccttcttacgtgccgcttcttcctcctccttgattctagcggtttcgctgacaaggcgcagagggcgcaacttgtcctgttgcatcaccgctccagtgtagttgttcatgccgccactggatcgaggagtgctagaggtggccccggtggaggctgtatctccgtggggatcgcttgtcacactgggggagctgctgcgaccaatccgctccggctgactggacatggaaggtgcacggctcatgctagatatatagcttgctgctccggagaacatgctctggcgggatccagggcccattgcagtcgggctaataggtccgccggagttgcgtccgccgcggtacatgtgaccaatgacactcgcggcacttgggtcgacttgttccgagcgactgcgacggtgggtggatgctctcacagactgcgtacggaagggaatgctgggcgcagtgttggggttctcattggggttgttctgtggggtttgcggtggaggcatcatgctggttggacgcgatcgaggttgggttgaagggcggggattctgaccaccaaccatcgacttcgctcgttgtatgagaccttgtgacgaatcatcatctttatccgaaggaataggggggagttccttttcactgcccccggtcttcgtggtggaagtttcatcatcctcgttccggtccagtatatgctcaaatccgtcatgcataagcagtctgctgataatacgctctatatagagcgtcagggctttgttctgatctttcagagccttgacctctccgtccggttgttgagcagcatcgctttcgggcgcctcatctacagattcaagctcatctgccaaggaccccagccctcctgccgactccttagtggggttggcatctcgcatgaaatcgcccttggcaaagtccccggtaagagtcttctcgctgagaagaagttgatagctttcattgtcctccatcaagcgagcattggccacgcgggcctcgagcaagtccttctctagttctcgctgacgaccgccaccgttctccatctcgacgagttttatctgtgattcggccagttcgaggcgtaatgactcgatgagtttgtctttctggaggagaagtgtagagttgttgcgggacgggctccgctcgatgtgcgaggagggcgcaaattgaccgtccacgtccggggaagatcgattgcggaagctcgctatagccgaggtcagtctctggatctcatcatctgcgattgtaggagcatgggtgtcttacaagatcgagaaacttggttacgatccccttctgcattcatgcgcatgtccttctgtgccatcgcgtccttcaaccgttgaatagtggcctgcatttcctcctcccgactagtctgctgttctttctcctgaagcatagcgttccgctccgcctcgtggttctgttccagatcccggatctgacgaccctggtcccgaatgtcactgttaagggcctcgatccgactgtctcgctcatgagcctggtcctccaacttggtttgttcactgatcgcttcatcgaggcgcatttgcagaacgccgagctgcttttggtattgttcagatgcagtttcggccttttggagttgttcccgcagttcctcgatgagggcggcattctgagcccgcgcctcttcttcggaggggtcattggaaactcgcggtacgtttgacatgctgaggttggaacggccaggttttcttgcagctgcgcgggctgatacgggagtcgaacctcttaaggaaggagaacggttaaggctagttgcgctgggtgagcgtgcgtgccctcgtgcggacccgttgttggagtgcggatctgcggttgatgatttgctggaactgccgggagttccaggctttcgaggcggtgctgacatgatgaaacgacccttgacagtccgctggtgaatgtataagaaaatgaaacgtatatagccccctattatacttcaattgggaaaaaggaaagaagatttcagggttgcaagtgtatttaggagcggtcaaaacctagtggacaccttgtggagagcgcttgtatgggaagattgaagggccaggaatgtggttgaaagctgtcacaggctgattgcgtgccacatggttgttcggaattggagattcatcgaaaacagcgtgaaagtcggaatgagaaaggaattgagaaaagtgctggttgcagaccttcgaatcaaagttgtcttggggaatgcggatcccttactgtatctaaaaatacgcaacggcttggaacaatacgagagagtaaggactttctggaagaggaaaagagaagtcacaaggggaaatttagtgaaataaggaggcgaagtcggttgtttttcttgttccaccgggtcgactggcctgctgagatggcgtgggctcatgaaagagcagtacaaaagggggatagatgcctgaggccgtgtatcggactaatgtaattccatctccacagcggaagttgacactttgctccactgcacctgcgcaccttgtccctacaacatatgctggaacagtcgagttcgagtacggagtatctgtatactacgttcggatgcatataatgctcgccaagaccctaggcgtcatctctcgggcaaccatatgagtcacttttgttatcgcaaagtttaacaacgtgcatgcaacggatcccaagttgggtatctatcacctgcacactcccaacccctagcggtcaggcaacgactcctgaaaatgtcaggtgacccacgatccaatgatgttgaactacctatttaggtaggttcaatgttcttatgtattcttaacgaattcaatcctggttctggcagggagggcaatatgagctgggtttccttgaatttccccgaggtttatgtcgccgacacaagagaagttgtgtcatctcaaaaaggaagttttcgccctcccataagagaattgcagtttacctcctgcccgtaggaatcaacagattaaatctagtcactgtagtttccccagcatcataaatctgaacgatacatatgtatagctatgacagctgggtggacgaaacctccaaatatagacatttgaatactttctaagccactgtgtcttcctgaacttgatcaacatcagcaccccatggcacgttccccgagaacgacttctggttctgattgcctggttggtctgcatcaaagtccaaacggtccgggatccttaaaccggctgggaaatggtatctcacaaaccatgtcgatactccatcccggtacagccaaggatcttctgtccgtcgctgccatgtttccagtctcgtcctcagatcatcgagtacagtagcatgttctgggtctttggcaagattgatcacctcatttggatcgttctccaaatcatacagttcttctggtgcgcggaaaaagtaatccttgagctttctctgcccgatcataacctcgctatctgatgagttccgaatatcttcccaagaaagagacccatagatgtcagccgcaaatggaaagtctaggcgccatgcgaggtttcggtggtatttgtatcgtcgatctcgaatgaacctcgtcggccagtagtttgtgacttcgtggaaagtatgtgagccgaatacttggttccactccgatttttgggcatttgttccgagtagcggaagcaacgagcgtccaagccgcttctttgctgggtcctctacgcccggatgtccaacatagtcaagaacggtggggaggatatcgacgtatgagaccatgtcagagttgactgctggctggacatttggatgcttgataataagaggcaaccgcacccctgcatcgaaaagagttgttttagagttgatgaaaggtgggccgttgtcgctgatgaagatgacaagagttgattcagtcaagccagcctctttgagagcattcaaaacaaaagcgatcccttggtccaggcgatgaattgagttatagtactcagccaactcgaaccggacacccggagagtcgttgataaaaggtggaatctcgaccagatcgctattgtaagagcccttcttgatccgggagtcgtattcttggtcgttgccaaatccacctcgtgtgcgatcgcggtgtggatcgtggaaaccaatcgtcaagaagaaaggcctctcatctgccagagactcttggaagaagtcattggcttgatcagcgatcacagccacatccctcgtttcactctccttggcgacctcccagggatagactgccaccggtccgacatggatctttcccagaatacctgtccgatatccgctctgattcagcagctgtggtgcagtttcgacatgatcaaacgtgacaaagtgatggcggtgactggcaagtccgtactggccgttctggtgggtgtatatatgacggagcggctgccactacaggacgcggtgcttgcaaaggcatattcaaatttggtaccttctgcggcgagatggtcgatattgggtgtcttgatagttggtgtcccgtaacaaccaagttgcttaccaagatcatcggcgaccatcaacagtacattctttctgcttgccatgatgacttggtagatcgagtgaaagctttctaggcagctttttggggggaggacatggagagagaaaaccacccgactcaaaatatatttgctattggtggatttactcggtttgaaactagcctcatcttcgctaggcttgctgtgagcgcgagctgacaccaagatgatgtgattgctagtttagacctagtgccgagattggatactatgcttaccaattcttggtcttattatgaaaagactaaccagttactgactagttagttatcagatatcgattcaaaatgttgtcatctgcagggctcattgctcatcgtactaacgtctcaagcaacccacttttttgatagaggtatactaaccagcctatttgacttgaaaataaatcacgcataaacgatattatccgattgaatcatttcagagaatttgcctgtcttgtcaatcgcgaatcgcggccgatactagtggatggaggaattatggcgtctttcattaagaatattgtgttgaacggactgaagaccgtatacagactaattgtatttgaaacagtgcagctactaaaaccaggcctctagctagaaataccacaagataggactaagagtgaaaagatattgagaacatatccaccacgatgaaattcaccagtttgcttctgctacccttgttgcgtatcaccgttggccaactcatcggccccgtgggtccaacaaccgacctttatgataagacagtcgaatgcaacatccttgattatggcgctgtagctgataacaagaccgacatatccactgcactagagacagttttctcggaatgtgttcgcaaacatccgggtagccgattaattgtacccgaaggagagtatttgatcgagcgaggtgtgactctcagcaatggcacaaattgggcattccagttggatggtctgatcacagctgcatatggcggcgactggaatatcgcgcgtgagttgatactccaagggtttgcaggcacagagattatcaatgcaaccatcaacggggagggtgattctaaatttttattagatgtgctcgtcattgtcaatggtgagttcacatctccagacatctttggagcccaatgttgacaaaacagctgtggatttcgagttctattcttccaatggcaaaggtgcctttcaaggacagggttatctctaccgaaatctcaacaagtaagttatagaccattttatgagatgttgtgaagcttatacataaattccagcacggatcgcccgcgcttggtgcgtttgatctctccgaccaacgcctcagtgcatgacttgattctagtcgacagccccaagtttcacattatcttggattttgccgtgaatgttgaagcctaccatttaaccatccggggaggaaacctgggcagttatgatggaattgatgccattggaacaaactattggattcacgacaatgaggtatgcgtctcaacccctggtcttcatctttcacctgaactaatgatcattctaggttaccaatcgggacgaatgtgtttccgtgaaaagtccttctcatcatgctttggttgagaacctggtgtgcaatcaagcaggctctggtatatccattggcagtctgaatgtatctgctgaaatatccaacatcgtcagtttcaacctgtcgatatcccatcaaatgctaatattgcagtaggaagcacgcaatatcagcattatccaaggcaacaacatagccttcatcaaaacatatcctggtggatccggctacgttacaaacatcactttttcgaatttccgctctctggggagtctttatggcttggatatcaaccaatactggcagaatacgtttgagcccgacaccggtgctgttacattgagtaacctggttttccggaatttctctggtaagtcattgacaaatgttagttctggcagtattcttacaaagtttgtcaggctctgttgccgatggagtgaagcgtcctccactttacctcatcgcgaatgatctcacatacgctactaatgtcactgtcgaagatttcaccgtgtggacagaacagggtacttcggttgtgaacaagatcagcaatatctttggcaatggggatgatagctacgggtcaaataatggtatcaagtctctcggtgaaggagaatcgccctcaccttataccagcacctacaccattacagcatctccaactgactggcaggcccccacaactcctacgtgggctgttcctagtacgggttatggaagtaagctctctctcggcttcttttgtgtttcttgtcctaccagataactaatttctctacagcggcatctcctattccggtctatactccagctcctctgtggcgcccaggtggtgtggattatgatttgcattactggggaagcttctaggtggtagcttatcgaatcgagtatgcgacgatttggacactctcatttgtttacggggtatgttctatagcgtcgcagtgatctttggtatgcgcgaggctgtataggtgttatctttagtcaatgcatgtagaagaagagaaaatcgattattcgtggcaaagaagacagattcttccaagatttgaatgatatctagtattattttctctaagtttgtaatgatcaacctcagtattggataggtcaaggaacgccgttatccctacctaacttagtacgtattttaacttcaatgcacaatcacaccgaagcatagaattaagaccccttcgcatggcgtcagtaaataaatattttgtagccagaactcgagtcggttaattaacaatgccgtgaggtagaggtccgatgaacaagaccgactcgggagggagtgccgatgttgacagtggcgttggaatcctcaattctgatagaaatccaaggcgctagatatatatgtacattattgcaagacaagattttccaccaatctgagcaaatttaattcaacttttccaccgctagttgcctggacttggcagagattgatgcaatcaggcgctatcatggcgcaaaaatatcggctaaatgtcaaggcttgttttcattcatcaacgacaactatctttgatcaccgagcatcatttagaccattatagcgtcctttccaaatcgctaggaggaattcactatctctccgttgggagttcctccgctggcgtaaatggcatcatgcatatacttgagcacgcattttgtaccttgcagtctgagtcggattgatattgttcttcatttaatctaatataaagtgttctatctcaatgtatatctttgaatccagtactctctgtctcgttcttgattttcgactcatgcgccaaagatagccatggcatcgacattttccaaagagcttccagcatcggattctgggcctcagaatgacgatcatcatcacaaagacggttctgtggtgacaacccttgctgagccagaggaacaacgcgagtccctgtcgctgttcgctgcacttttcttgcggaaacggaaagtcgacccagaatctattgcaacagttcggagtgtgttcgatgatcctctgttggcgcaattttaccaaccccgtccggactacgagaatattcacagattcgatccggaagaaagatggactcaccgtgaagaactctcagtacgccgcaagaccgattggaggattttcttgtggattcttgtcatgttttttggactcaatctcgatcgaggaaatctaggcaatgccgcggctgataacctgctcgacgatctgaagatcaccaccaacgactataacaacgcgcaaaacatgtatcgtatcggctttctcattgctgaggtaccgtctcagatgcttggaaagagattgggcccagaccgctggattccctttcagatcatcttgtggagtttagcatccggaggccagttctttatgcagaatcgcgctggcttcttcgcatgtcgcttcttcattggcctgttcatgggtggcttcatcccagatgcagtcctgtacctttcctacttctataccaagtctgagatgccattccgtcttgcattgttttggttcgttgattccatgtcaggtgttgtcgcctcattcatcgcctatggtgttctgcacatgcgcggtgtggacggccgcgaaggttggcgatggctgtttctcatcgaggccctcattagtctcgtgataggattcctcagtttcttattcttagtaccgggccctacccagacgaagacttggtggaatcctaagggatacttcaccgaaaaagaagaaaagatcattgtgaatcgggtgttgcgagatgatccgtccaagggcgacatgcacaatcgccaggctctttccctcagcatgttgtggcagagcttgatggactacgacttatggccgatttacatcattggaatgcttttcgaaatacccacagcgccaccgaaaacttatctgacgctttcactgaaatcgattggatttagcaccttccacaccaccttgttgacaattcctgtcactgttttcgcctccatcaatttggtgcttgtgaccgagttgaccgagcgtttgcaggaaatctccattgtcggtcttctcactcaggtctggaatctcccacttctcatcgtcctttacacatcagctggatcgctatcaagctggggtttgtatgcagctagtttcatactactgggctggcccaacccgcatgcagcacatgttggctggtgctcacgcctcagtaatactgtgcgaactcgaagcattagtgcggcgctctacaatgtgaccatccaactttctgggattgcatcctcgaatatctaccgcagtgatgataagccattgtaccgccgtggaaactcacaactcatcgctatcaacgtcactactatggttgcctatgttctggcaaaggtatactacgtgcgcaggaaccaatggaagaaagctcaatgggataaattgacaccagaggagaaggcaacttatctgagcaccactactgatcaaggaaataagcgattggacttccaattccatagttgagcactgtcccaaaatatctgctatatctctactttggatccgagctcattgagatgttgtcttcactatatatcatacatcaagaagaaaagaattgtgtcggatgcagaaagctcaccgtgcattatttcaagttcagctatgttcaaaatctacgtaaagattcctaatcagataaatacatcggagaaaggggcatagatctctcattctaagtaaacctccaattaaccaaagtatcgaatacacaggtgttcaatttcatggccttcaagacaatgtatttatcaggatgtacatcagtagggataagcttgtggatcaaaggtaggtcgagatctcaacattgtttttacttcttcttagctatacctaacaaaggactctgattgtatctttatgtcgagctggtatattttagcttcttgagcgagctacaggtaagagaacataaaataataatacatacagttctaccgcaaaagtctccgtacgacccatacccattacatatatatctccgtacggagacttttgcggaggaactatacaaccgagatgcatccaagagagcgggagtgctccaaatcagataaaagtggaccgaaacaggattagtggggaatcttgttgaccaatcaaaaatgtggagctgtagcctgggctacggcctgaggactaaggcattaaatagggttaaacccttttgccacagtgctgcttggaaatcaagacccgtgaccacagcgaaaccctctttctctttctccttccgaaccctcgacaaccaccgacaacctatacccagttcgcaggaagtgccatcaccacccttccaacactcaaaatggcccgccgtcccgcgagatgttaccgctactgcaagaacaaggtgcgtgccgattcgatttcgcgagctttgaagatttgtgcgggctaccttggtggtggggagtgtgcatcaatacatcgccaacgaccacctcaccatgaccggaatagcacatttattctcatgcgagatatgcgtggcactggttgtggaaatttttggggaaattttttcttttttttaaggtccgcagttttcgctgacatcagtcttcaacatccagccttaccctaagtcccggttcaaccgtggtgttcccgaccctaagattcgtatcttcgatcttggtcgtaagaaggccaacgtggatgacttccccatgtgcatccacttggtttccaacgagtacgagcagctgtcctccgaggctctcgaagccgcccgtatttgcgccaacaagtacgttactcgatctgctcccacatctttcgcctgacattcatggacatgttctcatataactttcaataggtaccttgtcaagatcgccggtaaggaaggtttccacctgcgcgtccgtgtgcaccccttccacgtcgtccgtatcaacaagatgttgtcttgcgctggtgccgatcgtctgcagaccggtatgcgtggtgccttcggtaagccccagggtctcgtcgcccgtgtgaacattggccagattattctgtccgtccgcactcgtgacgcccaccgtgctaccgctcttgaggccctccgccgttcccagtacaagttccccggtcgccaaaagatcattgtctccaagaactggggcttcacccccgtccgccgcgaggagtacctcgagctccgcgacgctggcaagctccgccaggacggtgcctacgttcagttcctccgtggtcacggtaccgttgaggagaacatgaagcgtttccccgttgcctacgagaatgtcgcttaattgttgatgggttgatcagaatatgaagttcagaacgaaaatacttgagtgttcttattgtctttaccttgcctcattcctcttgatatcaatctcgtgcaatcgcaatgatggagttcttccgggagtcttttcatttgctcgcctaattgcactcgtagatctgtttatctacctgggcagtaccgtaaactatgtattatttttgttgccagccctggagtgggcaacatttgcgctttcgatcatgcacggatcatgcgaggtgcagtcatctggtggatatcattcttatctagcaaaactagcaaaagtctagaccgaactccatagtgggctttgttcaacgatcagcaggaatatgggtcacgtcaccaagactgcagcatcacccccatcatacaacatgtcctgcgggctgtattgctgatttcgtggagtcttcattcatgcagctgaatgattaaacggtgggcaattcgagtgcaaaaattaaggacagaccaatgtgaggcctaggatttagcatatatattctaaggttagtattacgcacttgcattcaccgctatcattatggctagattaggtttacgttggcaattaggaattagatcaaggctcattcattgttccaatccattatatccatcctttcgaaaaaaaaaagatcgtttggacatcaaagtatatataacctccttactgaggcggcgacccaccacaacgtttcttgtgcaattctccagcaactaaagggaaacaattagcccaagtcttcaaacaattataatctcacagagaccgattggaaaaccaatagaagcaaaagcgcaatgtgtgaggagaatatacctgtcaagtctgccgcagtacaagaaaccttcaaacaggtaccgagcgtatccttgaacgctgggcttgggcaagtgcacttgtagtcaatagaggagagacagcctgctactgcagaggcttcgttgagacaacgaatctgtttgaaatacgaaaaggtggtcagtcttctgagtcaagtcatacatcctggtaagagacatacaaggcagggactggcatcatccagaggatcagcgacggtccatgacaggaacgcagccagcgggaagaaaatagtgagcttcatgttggattggtgcgaaacgtgggtttagtagtggtataatgatagaagatttggagtatgaaagtggaggagttgatgaacacaggacggccttgctcggtttatcaatagtcagtatatttgtgtagtgataggagagacagtacattcttcgtcaaatcggtatctcagcatcaacaaacccggtgcctgggtgatacgtggaatgggtttcattggaatgtgagaccagctaagcttctgaaactgtcaaggttacaacgagagataatcgattggataccacgtctatttcttatccagtcggtacatattagcatgttggcctatctgaatgtcgtaagcaaagttagatccaaacaatacggtcttgatttttgtgatgtgacttcttggacactagggagattcttttggaacggccacaatcctaaataggacaccactcttgattcgctagattatgagcggctttatttatgggaataccatcgactgtagagctccaatatcctctatccatgtgcatgcatgttgcttaatttctcggaacgacttacgacaggccccactactacatagctttggtttcagtactgatctgcttgttccttattcaacggtatgttgatttcagaatggcaggactgaaaacattccatttgatgtctctaggttcgggatattccggggacattccattcaattcgatatccccggagcaagaaatcgagacgtccagtggttcttagcaagttaaacaccaaccgaggggaattcccatcgaaagttaaccatttctgcagataaaccagcctattgctgatagtcccctgacatagtcctcgccggctctcgtaccttcagaagaaaatcagccgcagaccaatgcttagtgtatgggatgaggatacgggggtcttcagtcctgtcattatctactttcctcttttctttcatagacgaaagagctgaagtatataaatcatacgcgatggccgctattcccactattccaaattaggaccccgagagcaaataccgggctttgattggttagattacatacaccgccaaatatcccgccttgaccaaatacgtagagctatccaatctcctatatttctcttattatatgctatttttcctagatctatatgctgtacactgagaaattcaagtccaactcagaggtacaagtccacaaatttacgcggtcttcgggatctacatacctatcacaggtgagtggggtagatgtccagttttctgctgggcagtattaactcgcatggtcgcaaagctagtccacgggttccagccccgcatacgtcaccctcaaaaatcctttttctcctcacaaacacagctatgaagcagagattctcatctttagacgtcaaggtatcttcaaatatgtgtcgaagaagatatcacactaacaaccccaggtcatcacccaggaattggcgtcggagtgtgtcaacctccgagtgtccaacatctacgacctgtcctcggtacgctcaattcttttctctattaccatggaaggacggcgagctgattatttattcctattagcgtatatttcttttcaaactcgccaagccggaccatcgacgccaactcattattgactccggttttcgtactcatgtcactcaatattcgcggaccgcggcatccacaccatcgccctttgtgacccgtctccgaaagtacctgaagtctcgtcggattacaggcatcacccaaatcggaactgatcgcatcatcgacttctcttttagcgatggcgcataccatatcttccttgaattcttcgccggcggtaacattatcttgacggaccgcgaatacaacattattgctttctttcgccaagttgccgccggtgttggtcaggaagagataaaggccggactcaagtacactgtatctaataaacagaactatgatggggttccagacatcacagcgaatcgggttttgcaaacactggaaaaggcacaggggctttctgcccaagaggaaaatgcaccaaaaaagttcaagaaaaagggaacggatgttttgcgcaaggcattgtcgcaaggctttcctgaataccctcccttgcttctagaccacgtctttgcgatcaaggaattcgatactacaacgccactggatcaagtcttggggagcccagatctgttgcagactgtgaaagaagtgctagaggaagcgcgtcgaatttctaacagctttgattctggtggcagccatccaggctacattgttgcgaaagaagacacgcgacccatcccggaaggagagacatcgtcaaaggccccgggtctgctctacgaagacttccacccttttaaacctcgacagtttgaaaacaaaccaggaataaagatcttggagttcgagcgcttcaatgccacagtcgacgagtatttttcatcccttgaatctcagcgtctcgagtcacgattgacagagcgtgaagaagcagccaagaagaagctcgaatctgtgcgatcagaacacaagaagcggattgatgagctcaagaccgtgcaagaacttcacatccgtaaagcggatgctattcaggacaatgtttaccgagtccaggaggcaatggatgctgtcaatgggctcgtggctcagggaatggactggggtgaaattgcgcgcctgatcgagatggaacaagatcgcggcaatccagtggcgcaaaccattaagttgcccctcaaactgtacgaaaacacgatcactttacttcttggagaggccggtgacgatgaggatgaagacgaggagttttctagcagtgatgaatcagactccgactcagataacgaagcagaacaagagacaggtcgtgcggaacgagagtcaaatctattgaccattgacattgaccttagtctgagcccatgggcgaacgcatcgcagtattatgaccagaagaagcaagcttcggagaaggagcaaaggacaacgcagtcgtctacgaaggcactgaagagtcatgagaagaaggtgacgaccgacctgaagcgaggcttgaagaaagaaaagcaagttcttcgacaggctcggacgccattctggttcgagaaatttatctttttcatctcttcggagggttacttggtcatagggtatgtggctctattcaacaccgttttatgaaatctactaatcctagtagtgcacgtgatgctatgcagagcgaattgatctaccgtcgttacttgtctaagggcgatatatttgtgcacgctgacctcgaaggcgcgacgccaatcgtggtaaagaaccgagcgggcagtgcagacgcaccaatctctccaagcacactatctcaagccggcaacctttgcgttgctacttccactgcttgggattctaaggctgtcatgtctgcttggtgggcgcatgctcatcaggtatcgaaaatcgccgagaatggcagcggaatcatgcccacgggtgtctttcaaatcaagggagagaagaacttcttggccccatcgcagctggtacttggatttggtattatgtttcaagtcagtcaggaaagcgttcggaaccataagcagcgatttgaaacacctgacattccaaacgccgctataaatcctgcggatgagactgaggcttctgagccgaaggaaactctggagccagaagcctcggggcagacagaggccaccgaagaagctaccgaagacgcagagaaggaagatgcggaatctgaagaggaagacgaagatgagaaagccgctactagaaaccctctccaacgaggcaattccgagctctcggtctctcagccaactcaagaattggcgtctgagtctgagtctgagccggaagaagaaccgaaggatgagctggaaaaagaagtcggagaagttcagggagaagaagctacaccagcagcaggtcaaaattctgtgcccgagaaaagtgaagaacggaatttgaacaatcgagagcaacgtgcctcgggacaaggcaagcttcttggccaggaacaacctgcaccacgcatcacccccactcgcggtaagcgagcgaaggacaagcgcgctgctgccaagtatgctcatcaagacgatgatgagcgagaacttgctcttcggttggtgggtgccaataagggcaaagctgcaaaggcggccaaggcagctgaagctaaggaacagcgtgaacgagaggctgaggcgcagaggcaacgacgacgggcccagcacgagcgtgctgccgaagccgagcgcaaacgccaagcccagtttacagaaaatggaacggacgattacaacgaggagacagctgccgccgaggctgcggatctcacatggattccagcattggtgggtacaccaactatagacgaccaaataattgctgctattcctgtatgtgccccgtgggctgcccttggacgctacaaatacaaagtcaagctacagccgggctccgtgaagaaggggaaggccgtcaaggagatcgttggtcggtgggtgtccgagaccaccaccgggaaggtcaagaaggagcatgccgaagatgtcgggatctctcgtgtcgatgctgagcgtcttcgggaacgggaaggagagctcatcaagggctggaaggatacggagattatcaacactatggttgtgggcaaggtgcgcatcatgactgcaggagctggaagcggcggcggtggtgataagggcaagggcaaaggtggaaagggtggaggtgggggtggaggtggcagaggaggtggtaagggcaagaagaaatgattgggtcttgtgtatgtattaggagcacatatattagagcattgtattcaattcaaccaggatatacgagatatcctaattggtgttgagccgatgtatagttatcaagcctggtctctttatgactgctgatctgccacaaccccgcttcgacccgttcatatatacttatttcaacctcatatactatgaataactcccattccatatgtattgccaataatatcattggcgacgtgacgatgccccccgtgttcctgatgcgctgagtcatccgacgtcatgacccgaagcgattttcttgcgatcttccggctctcatcgcttctgacaagattgtgcagaatgacagccgaccgcgtacgctgagacgacctctcattctaccttcaatagaagagagtttgccccacgcaactagagccaggcctcttcaggcatcatttcgtccctgatctggtagtgtgtgtgcctgaatggtgcatcattgaggtcttctcaaacaccacgttgctttccactcgtgcttttgccggccactgtcagcgcagttgtgccagattcttgaccagtatgtctatacaaacgcgggttgtccccgtccaacggctcagccaagggcctggcgatttatctctggcggaatggtgggagaaggagcgcagccaaaaaacgcccgagtcccaggccatcgaagaagctgccaaacttctccggtctagtgacatccccgttgcctttcctaccgaaactgtatatggcctaggagccgatgccacgcgcagttcttctgtccagggaatctaccgagccaaacagcggccctcggacaacccgttgatcgttcatgtcgactcactggacatgcttgagcgtctgcttaatcctacctcccaaggcagccctaaatcaaccagaatgctgccaatggccctcccttcaatctacaagcctctgatcgacagattctggcccggcgcactgaccatcattttacctaacccatccgggtccatattggcgccagaggtcacctccaacctgaccacattcggcgtccgcatgccctcttctccactggcgcgtctactcatccacgtaacagatcgccccctcgccgcgccatctgccaatgcgtccactaaaccatcccccacaaccgcgcagcacgtataccacgatctcaaagaccgcattgagatgattctcgatggaggagcatccggcgttggtgttgaaagcaccgtggtggacgggttatgcgacccaccggcgattctgcgccccggcggcgtcggcattgatgaaatccggaaatgcgcagggtgggaaaatgtagcactcggctacaaagacggcacgctagacgtgaaagatgttccacgcgcaccgggcatgaagtaccgccactactcgccaaaagcacgagttgtactcttcgattcgacatccaacctagttggagtgatgaagcatgtccaaaaggacttgaaagacacagccattggcgcacacaaaattggtattatccgcacgcggaattggcagctcggcttggggctcgcttcagaagatgacatcgccaataccatgacccccgtgtcttctgccattgagaacattgtcagtgtcccgatccaaatccccgtgctggagaatggaaaacccagtagccgtacgaagatagcatacgattaccatcttggctcagatgcggtctccatcgcgcatggtctctttgccgccctgcgcgcgttggacgagcttaatgtcgatgtcatctacgtggaaggcgtgtcagattgcgagggtgatctggccgctgctgtcatgaacaggctacggaaggctgctggtgctgaaatgcgggtttagccctggagatggagtccgggtttttcttttcggggtttagatagaggcttgaaaagtgtgaatattagatttcaaatatattttaacatacaatattatatattattcacgtttcatgtgcacggagtgcacatgtattgaggattatgattggaacctcttggacttacccatttggtaaacatctgggtcctgttgatcttcatatgacgtgaaattcggagacctccggggcaaaagcttatcaatagacttaattttgggattagaaagtgatagaagacagctgtgtcacgaaaatgaagagccatgataacctgagactgcagcgggggagaaagcaaactcgtccggcgcttatacctcgtcccacattgacctagaaaattctcaaatccaaggaaacttactcactgcaacccgcaacaatgtgtcaatctcctttgcacgagttcctcaaaggcctccctaaatgtgagcaccacgtccatttggagggcacccttgagccagaactcatcttcgagctcgcggcgcgcaatggtatcaccttgccgaccgacccagtctatacctcggttgagacactcaagaaacgctatgagcacttcagtaacctggacgacttcctacacttctacttcgaaggcatggccgtcctccgcaaggaagaagacttcgccgacctagcgtgggcatacttccaaaaggcgcacgcagacggcgtccaccacgcagaggtccttttcgacccgcaggtacacgaaagccgcggtgtaccatacgacacaattgtcacaggcttctcgaaggggtgcaagcgcgccgagaccgagctcggcctaagcacaggattaatcctttgtttcgttcggcatctccccgtctcgtcagccgagaaagtctacgaggagttcctggctcacaaggactttgagtctggcattgtgagtggactcggttggtcttcttcagaagtcggcccgccgaaagacatgttccgcgagatctatgcgtcagccgcacagaaaaatatcccgctcacggcgcatgccggcgaggaaggtgatccgacttatatcagcacggcgcttgagcttggtgcccagcgtattgatcatggtatccggctggttgaagacgaagagttgatgcggcgtgttgcgcgtgagagtatcttacttaccgtctgcccattgtcaaatgtgcggctgcgctgtgtcacttctgtgaaggagctgcctattcggcggttcttggaggctggagtcaagttctcgattaacagcgacgatcctgcttattttggtggttatattcttgataactactgcgctgtgcaggaggctttccacctgagtgtgctcgagtggaggatcattgcagagaatagtgtccaggggagctgggttgaggattcgcgcaaggtggagatgctggccagtatcgaggcgcatgtcgaaaagtacacatctttgcataacatcgctgtataaattcggattgtcggtgtattggtttctgttcgagttgttggctgtggtgggcgtgagcgtgggcggtgcatctgataccctgtgtttcaacacttttataccatttttcaactgaagtatataataaccaggcgaatagcaagttaaatatttattctcattcctagcggagtaccttggaagacagtcgagagtaataatcactgatgccttgtaaatcaggcctcgcatggatccatatctggacagacgactcctcacttgcacttgttgtctgaccgtcggccctgcacaacagtaccttatgcccccaaacatcccccgtggtacctggaggctcacgaggtctattttacgacccctactacgatcccagataccatataccctgcggctcgcgtcgtgtttcgcaggaatcaacccaggaacaaccccgcagcaaagcgcacgactacttaatatcttcaaacgaagccacagacagagcaatatacactcaaaacacaaaatgtccacctccactccggaccgctacaagctcgtctttttcgtcccgactgccaacgtggagcactgtaaagaagccatcttcgccacaggtgcagggtcattcccaggtgggaaatacaccaagtgctgttttcaatctgttggcacaggccaatttctgcccaatgagggcgcagacccggcggtcggggctgtcggtgctttggaacggtgcgaagaggtcaaagttgagattatgtgtcttggtcggggcgttatgctgaatgcagtcgatgctttgatcctggtgcatccatatgaggaggttgcgtatgaggtttataagatggagaacgtctagttgcgcgactcaagatgtggttggtggaacacagcgtaataatgtgatgcgactgggaagatagttatctagttctgcaatgatcaatttcacaagtatatttcaaggaatttcgagtccaataaaacagttcgagagtatcgttgtctcaaaacatggaagttgtgttggctgtcttcgaagagcaattgtatgataacggattggtaaggcggtagtaatccctggatgctgatttgcccagggcccgccccgagtaaaacgcctcgtcaacttgacttctcctccaacctccaacctcatctccccccaattgaccctcacttatcgcccgtgatggcctctaaactcttctccgtcccgcgggtcggccgccagttggttcaccagctccccaaatctcaatacagagccttctccgccggttcgcaacggttcagcgaatccctttcggtggtgcgtatttcgttccacccctcttatgcttcaggcgccgattatgccgcagggttgaggaatcaaagactcatatactgactattgttgtctctaatagcatcgcaacaaacccaacaacaacccgaccctcccgttcaagttttccgagcagaacctcacactcgccgatgagatcctcaagcgctaccctccgcagtacaagaaggctgctgtcatgccactgcttgatcttggccagcgccaacacggctttaccagcatcagcgtcatgaacgaagtcgctcgcatgctcgagatgcccccaatgcgcgtttacgaggttgcgaccttctacaccatgtacaatcgcgagcctgttggcaagtactttgtgcagatctgcaccaccgtaagcacatgaaatcaacactatttcctgctattcctaattcgcaatcctccagaccccatgccagctcggcggctgcggtagtaccgccattgtcaaggccattaccgaacacctcgggatcagccccggccacaccaccgaggatggcctcttcacatacatcgaggtcgaatgcctgggcgcttgcgtcaacgctcccatggtccagattaacgatgactactacgaggatctgactccggagtccatcaagaacatcctgacagccctcaaggactctgccaccgcaaccggtgccgccactaagattcccaccccaggcccggtgagtggccgccatagctgtgagaacagcgccggcttgaccaacttgacggacgtgcctgtgtggcacccagagacgatgatgcgcaaggacagtgcattggacgccgcgcccaaacaatagaaaagcacaaagaagaagaattattaaaaagagctcttcattgccgtgggtcaattccggatggggaggatattataatggttgtgcttttttcgaatggacacgcaaaaccgccatagggcattgcggtcacactacggtcaacttggggaatgattagaggccactgcgcccttcgccctgaggcgccctgaatcataatcactcttgaggcgtccgaatttttttttctgtctacatcataccatgtacagtacgtttgttcctggttcttattgaagtgatcggagcccggatgcagatcaggcctagtcactgtggaatatcggcaggaccaaatcgcagattttttttccacttcctcttttacactagctattgagctcgtagatgggtgagtacgtgtgcaagatattgttggttcctgctagttttatgagaatttattgcattgcatggcatcatatcgagatatccatcctcgacctccgctggctgagttagggctagtatataaatttgtctttgtcaaaacgctcaactccctaccgggctatacgttgctcgtgtttatctagccgccgagctagtatatccaatcatgttttataacatgtgctctaatccacaacattctttcttggcagacggggcaataattcataattcatacagcaggtgagatttagatagactatctgtgcacaccattttgttgcacgatttcattacttttacatgagatgtatgcatgaaggaagcaaaccacccgtgtccaccttgtttaccacgagttcttaacatgggcaaaaaaaagcgccctcatgacagtcatagcaaccggcataaaatccaaccgcacaagtggcctcgaggccatcctactctggcatctcctccccttcgcatccgatgtcgtttggtaatacttcttcttcgggaaccaaaacgtggacaccttgacgctcaacgagtttgcttgattgagcgttctggaagatgttgacttcgtatgtgttcttcaccagcaaatgatagacatggacctcgcgctcctgtccgaatcgccgtgcacgtccgactgcctgggtcatgcctgcctcaaagtcatggtcagagggggcgaaatatggcgacaagaagataacgtggtttgcgcattggagattcctttaattggatcatattagtaatgtttctaacaagaataacggataatagcagagagaaatgacttacaatccagctgccatggagtttccgagattcaagatcaaagccttcggtctagaaggtggttgcgtcatgcccttttttagtttcggagcctcagtgaactcatcgattcccttcaagttagtctgtgtgaccatgcggtggtcgatgttcgcagcttttagggcattcgataccacaggtaacagatgattgatttgcacaaagatgaggacaagctcttcctctgggacattgcggacgatctcaactagcttgttgagcttggtgctctggatttcttggtcttcgctgacaaggatttcaccgggcacgatcttggattggacaatttggccgccgcatccaatgatagggcagggtttgcgtgatccggcggcaatacaatctttgcagaggacatgaccgcaggttttgaggacgttgacgtcttctttttcttgcaagtcgccattacatttttgacataaaagaattccaatggtttggatcctcactagatgttcgtagaatcggtattcccggtcaatctcgaggacctgtttcaagagagaggtgacatcagcggacaaggttttttcgacagcgatccaaaccgaattggaaaacgcatccacgggttttccatattctgtggctctaggaggacgctttccagtcgctttgttgccagtcttcgaattttgtatcttttggaatcgctgttggagcaaatcatcaattggctggtgttgttcggcgagtttccactcactgtatgagcggatgatgtcctctaagagctgtttgaatcttttgttgagttgcgcgtccccaaaatcaatcttggcgacgccattcagggccttttgccagttgttgggatcggtatttttcaattcgcgataccaaacaatcgctgcctgtcgagtgatcgagtccactttagtccagatctcagcggatttctttttgtcattctgcgagccttttcggcacttctcgaggttccatggaggttgtccgatttgatttgtgacgcaggacatgatgagagcctcttgggggacctggctcttagacaaaatggtgctcaaggggccaggaatccgtctcttattttccttgacagctcgcaacaatgtatcgtacgctgtcttttcagcaggcgactgttcggtgacgacaaaggttgtcttcaacgggatatgtgtgatgcgtgcgatgttctgacgcgcaaatcggtcaaggaagttttgggcatgttctcggcggttttggtaccaggcgttgctgtggggggcctggtaatattggaatgcctcaacagctgtgtggttcttccggatgtttcgtagtctgctgttctgcgtcggcttgtcgcaatcgccatcgtcgtccacaccaaggtgtaagccaaggtaacgcgcaacactcttaatgtcggcaaattcacgaagagctggcgttccagaaaggatccatttagagcgtgcctgcaatgagagcagagaagcctgtctttcctccccggcatatgtatattcgtcgattaccaaacggttgaagttgaaagcgtgaataaatgcggctttgacagtgcgccagtcgtgttcggcggtcttattgatatcaaaatctttgcggtcatctttcacggcagttgatttggctccaagtttctttccgtcatcggttacttcggtcagctctgtcaatgagtgtttttgtcgctttcctcttggaccttccactgacttcctactgtgcctccgcttgcgctggcccgcttcgggggactgtctcgcatcagatgcgccaaagtcctcgaaacccgagtcagactcagaatccaaattcctttcttctcctgcattgcattcatcacgaccatttttagcatcagcaaatgcctggccacgcaggcgccgagagggcacgtaagtaaaattggcctgtgtctcttgaactcggcgacgtctggcttccaattgccgaagcattgcctcagatccttgtgttttcaatatgtcaacagactcccgcaaggaagcacgagcattgtgaaaccagctatcgaaatttcgacctgttcctccgctcgattttgcgggagcttggggtgttccggtaaattgttgaagtcggctgtagtatgcatcgttcgccaggatactccatgacaaaatcacgatatctgcatcttcgacttcccggattgtgatcttgctgatcgaggatattgccaaaactttgtattttcctccaaggaacttcttggtctccgaaacccactgcttgaagacgttgctgggcacgatgatcagtgttgctttggttgaaatcagcccgttctcttcagggggtttgcagtcgctttcatactgcgtgtcaataagaccaagaataacagccgtcttgccgtatccaacttcgtcggctagcacgccaccgcgaacaacttttggcattgtcgctttgacttcggcacgccaaggcattaaggggaggatggattcttcaacttcctcttccatgaatggttccatctcttttgcttcttgtgtaatcatccagctcagtgatcgaagctgttcatcacgaagcttgaatttgaaattgggaggttgtggcgaaagactatcgttgtcgttgctcctcaaagtaaaaatgccaggggtttcttgactcatgtcgtacgcatgagggagaagtcgccagaaagatgttactccctcatggcttgcggtaccaaacaatttaccatgtgcctgatgggtcaaagcttgcacattgagagtgaaacgcagttcagcatctccatgttcgttgattcgtctgaagaccaaaaatggcgagggtcggtttttgatggcacgctcgtagacggcagcgtcctgcggattctcgtatgggatgattcgatctctgttgtcccggccccaaaggatactaggggtgggtgggttgcaggtgttgcaattgccatttgcatgatgtttgaggtctgaacaatccgggaggatgatttcgttccagtctttaaagtcggaccacgcagcaatcttcgggaacaaccaagcgagacctttcaattctctcatagagacctctggattccaggcttgccaatcggaatttgcgtcaggtaggttgagaatcgatgtcgttgctgacagcgaggtgagagttatacaagcatcatgacagttctggttttcaatcgagacttgcattccttgttgcaatgtgtggagggtaatctgctcggcaggacattggttcagatgtgccttgggggccttggcccatcgacgacagaaagctttcacatcttgcgaatccatggtgacatttaatgatgtccactttgaagataactcggcgatcgtcattctcacatcatatccaggaaggcggtcgtgttcaagagcgaatacaaaggcatcttcgtctgctggtccaatctttgctgggtcaaggaataggaaaattcggggtgcatgggcggtagcttttcttctgtacaatgcaccaagggctgttccacaatcagggaggaattggtacattcctcggacgtcgaaatccagagctgcgacgttttgatctgatccttcaacgaaaatactgtcccagacttttccatcaacaaatttagcggctttaataccacactccgattggaatgatcgaacttggtgtcctctgccagaaatctgaagtaaaattggggtgctaatgggtgaggaaatttcccatgtacccccgacaagcgacccagaagttggactcattctggcaattggcttggctagaacttcccggatgacgcttctcctactcgcggacttggggggcttcgcgtacaacagccactggaaggagtccggaccgatatcaaggtacaagctggaatgcgtgccgtcataaaccactcgccattttcttcctcgcttaatctcaaaaaatcgaaagacatcgtgcacagccgccttgacgcacataatgaagtcgggccaaaaccgggggaggttggtgatgtggtaaagggatctaaacatctcaaaccccaagtcggacagatcagacagcataagcttcatcggaacaagcgccttcaaattcgctatgaattcagacggcttttgtcgagaaagtggggaaacatgtagatatgaatgcgtggggtttccacgacaggatttgcaagcggtatgtccgcacagtgtgcaactataaattgaatcttggacccgagtctgtctctcgcaggagcagcacagaacgctgctcgctgccttgactttgagaacagcatggtcgataagaggtgtttggacgacttggaggttacttctcacaaggctatgggcctcgctgggtacgagaagggacttggcctccgcctcgccagagtttgttgaaaattcctcgccgtcgtcaagaatctcatgcacggctatcagaccagccagcatgattgcacacactaccgtactcgtcattgcatttcctgccatatccatcaaatcggcttgggtttctctcgtgagtaacattcgatcgaggggcagtccttgcaacgaaagagcctccgtgccagatacggggccgccgcgggttgtcacaaatggcatgcccttcggtgtcagacaccctgcgataccagaaccggcaaggctgtcattccctcgatcgacgccctgagataagtcaatccaacgcctgtgaagtgaattgttagtacaatattcctgaagtgaagattgagtagacttactccttgaagttcatgtcataatcttgaagcatcttcttcaggaaattcatatccacggtctcccacactctctccgactgtgtcttccagaaacgatgccaatagaagtccggtgtcttcagttcattgatcccgggaagggatcgagtgattggcctctcgctacctagttccagttcgtcacggtgccgttggtgacgaatctggtactgatcccagctggtttcgcttcgggactcaaggcgggctctcatctcgatgagctcgagtcggcgatcgtcatcactcagcaagaacaaccccaccggtgcactcgctggccgtttgaaacgatcagctagctcacgaacgcgttgagtgacaatttcaatgccactttgatccatggtgtctccaagtaggcccgctgcttccaagcggtgcttgtcaataaccaccatgtacccgcgctcgcgtgtctgcgggatgtagtaatgcttcgtgtcgacattgacacaaacggacatgtacctgagctcctcccacttccccttcatctgctcccagggcgcattccggacattctcctgaacgatcatgcggggtcgatatctcttcgcgtaccgcaagagaccgtcgaacgtagctcccgactcgccgccttgctgcagcgtcttctggcggttgttcaaaggagagaagtcgacacaggcagttccagcaactaatatgtcgaggttaccgggaattgcttctaatgacccgtaggcggtccgccttgaaaatcaaagtcagtattagagtcatgtcagaggaagatggatggggtacttacgcctcgtctcctccaagttcggtgatgtcccgaaagaggagaggggggcggaagtttcgctcaatgtacgactgcttgaatggaacaatctcacagctgaaagcgtgcaagatccgaagttgctgggcctccggcaaacctatcaaggtaaaattagcaattgttccatggtcatattccaagaagcaccaagcagagagtgagagaggtcagaccgagtcactggaatgaggtggaaatcattaccaggcaaaagcgatcatgccatggaattcagggcgaggttaaggcaaagttagggcaaggaaggaaacatgtgacttagaagtcgggacaaggcctcaaccatggaaccagctacaacatgaacctcaacacgaagacaacaaacgaccgactgggggaaatgggaaataaaagaaaaacgagatgctgcactgcctgcacttacccttctgtatcaattccagggctagaagcggggcttcggttcctgagcacattgtcgccactcgaagtggtcgactgccgagccgaatgaggacttgctcgagtccaatttccatggcctttgatgccatgtcagcaaaaatttctctcagcgtatgcagaggggggaggttattggctagataccgacccgaagggatcatgcgtccccgccgcagctcaggaatctcatcggccccggcactagactcctgatcatccattgccaaaccatcccccgactgctgctgagaaattccctttgacaccatgatgtgcgttgcaggggctgagaactttgaggtggtcgggatatcagataatactggcaaaccagacaagaagaaacacgctgaaaaaaagcctggaaaccgagacagttacagtaatgacctttattaccggttcaggcacgaagcaaactgcaaatatgcaaaatgatggatgaagcgatgatcgtctggaaaggtgaaagggaagacgactagaagaagaagaagaaccaaagagaaaacgagatagaaaaacactgcgcgacgccgagacaacgatcgagctacccccgttttatgcgacggtgggttctacccacgaccgcaccaggaattccggtagctctcgctcgactcagcacgacagcatgtgccggcgacctggatcaacctacgctgagaggtacacctgcgctaagatatactactgcaagacgataaccaagccaggctcgaactaattaggtaactgcatgtgacggcgactcatctccatgcggagttagagagacgctggcactgacgaatacatctattccacctaggcagtactctcaatggttgtgtgagggtagccttagcacgccgtttatcattggcctgttctgtactatcagaacattaaccgccattaaactaatgttaccgcaatccaaatggttcagtaattgatacggagatcaagccccaatcacagactaaagctaaaaagtgaactattgctgtctttgctgagtttatgtactatgctgataactacttgcttcttgaggatatagtgagaacggtctagacgttattaacggacattatttttcaagcagaagccaatgtatctcttgatggaagctataatatatagaccgacaagcaagagcttcatataacagtacataggtaccatcatttgtcggccaactttctgctttcttcggacgagatatgctagtttcccattgtgtcccttctttgatgtatcttaagtggcacagaatgagcctatggtataggcaatggagatgttatggcaaatggttataggcaccggagtgtcaatgagctcatacacttctattatactcaaatattgatatcaatgtcttctctgctgtaggtattgttatcgagattacggattatcatgccggtctcgaacgtgagtagtggttaattgatgggttggcagttatccaccgaacattgaaatcatgtgcacagatagaatttgctgaaacgtcactataagacggctgacagccattgcgagagaatgtctagataatattaattctatatttcaccatgcagcttaagcaatcccacgaatggtgaggtaaccatagaggctttctccgtcaccgacaaacgcgccaaacatattaacgggttaaggcatagataaacactccaaagggaaggcaagtttaacgttgattgtagaaacgaaggaccgaaagaatcaagatatcattctgttactattttgaaggaataccttgaaattgaccggtatgcaaatcaatgaggaaaaatgacaacccctttacgccacccattcgcctagtacagtggcataagaaaatgagaaaaaaaaataattggccatgtcatgctcgctctcgacgagcaagccacaaaatatctgaatcgaaatgcagtatcaagagagggtaataccctaccgcatgccaccctgcatcaattgctggcgtagcagcatgatctggcttctttccatgggaggcagagcatcaatagcagcctggggcatgctgaggacttgctgaaggagttcctcctggccgtgcatcggggcggcaggttgaatcgggggaggggcgaaaggagtgccggtgacaggcggtgtagagatctgaccaggaacaccatactgttgaaattgttgaggggttggctgttgagccacttgggggggctgggcggcctgttcgacgatagaaccaagcagctggtattcgaccagattcatgaggagtagagcctggaagacggcgtaggcgagctgaggcgcttggcgcagcagctcagtggcacgtgctgggtcggcaaccgcaagagatttcatttgtgtcaagacatcgagcaattgatttggtgggagggatgcgagagtatgggagatggcgttggggcagtcgatctgaggcgggagttccacgcctgggggtaaaggaggcagtggcgctgagcctgtgatttgttgctgctgcgtggtatcttggttcatcattggttgcgactgctgcgagtaatctgggggtacggaatctttctcgttgttgtgaggccaatcaacacggatcttgcggcccatgacttcgtgatcgttgaggttgcgcaccgccgaggcagcggcgtcggcgtctgcaaaatctgcgaatccatatcctttgggtttgccggtctcaggattcatcatcaaccggaactttgtaacggtaccggccgtgctgaggatgtctttgacttgttcctcggtgaggtctagagaacgatcagtatcgcgcaggttagacatgcagctacggttacatactgtagggaatattccccaggaacacgctcttcccagtccgatcgggcgccatgattgcgataggaaatgagatgtcagtgagaaagcgaagaagtcgaggcaagcaagaaacgctgattctgcccgactttcccacaccgcccgaaacctcacctcatccgctcaagcatcataccaagtcaatcttcatctatctccaatcttttccgcgcacttactcacatcatgtctcaaaatcaacgggaggcttgggagcgcctgcagcttatgctgtcgaagcgtaaggctggcttcggtggcggcatcccatccggtggtggccgcggaggcatgggactcgtcggaactctcgttctggccggtattggtacctatgtcgcgtcaaatgctctgtttaacggtatgttaaagtcatctgctcaaggaatcaaatttctaactagtttttagtggacggtggtcaccgtgctatcaagtactcgcgcttcggtggtgtccagaaggaaatctacaacgaaggtatgaaaacccacgagccagacacggagctctctctcacatttggatgaccttaggaacgcacttccaaattccttggttcgagaccccaattatctacgatgttcgtgcgaaacctcgcagcatcccttctctcaccggtacaaaggacttgcagatggtgaacatcacctgccgtgtcctatctagaccccgtgtcgatgctctgccccagatatatcgaactcttggacaagacttcgatgagcgggttctgccttcaatcgtcaacgaagtgctgaagagcgttgttgctcagttcaacgccagccagttgatcacacagcgtgagaacgttgctcgtctggtgcgggacaacctggctcgccgagctgcccgtttcaacattgctctagatgatgtgtctttgacagtatgtaccttctcccctacctctagcccaaacagcttctaacacgccatctccacacagcacttgaccttctcccccgagttcacagccgcggttgaggccaagcaggtcgcacagcaagacgctcagcgtgctgcattcatggtcgacaaggcccgccaagaaaagcaggccttcattgtccgcgcacagggtgaggcccgctccgccgagcttattggtgatgccatcaagaagagcaagagttacatcgagctccgacagatcgagaatgctcgccaaattgctcagatcctgcacgacagcggtggcaagaacaagctctacctggacagccaaggattgggcctcaatgtcaacgcccacagcgaagagggcaaataatttcattccgcttgatacttaatggcgctgcgtggagggatgtgaattattgtacaaatagctggattaccaagcatctgaatgcggtctcttctctattttcttttcaagtctccttgaaacatagtaattctttgcaagtagtgtagacctctaggtaggatgcggggacaaaggcggcgagacgattttttagattcggaggggcaccacttcggtagttcaacacacttgactaggattgactagcaagtatcatctttaattcgtgagtatcagttggaaaaaccagctcaacgagttttctttttcttttggaattactcttcgcaaaaccccgctaacagcccttagagcatgcccgaagtcaccgacgataccccagtgcacctcaccgaggtcgacatcgaccttgacgtgcaagagattctcctcgccgcttcgcagcatgaccagtccaagctgcgccgcctcctccgcacccagtctgtgctgccagatgctgcaaacgttaaagacatcgagactggcttcacacctctgcacgccgcaatcgccgcctgcgagcccgatacagaggcagtcggcatcaatggctcagactccaatccgaatgatctggatgccgagaccgtgaaatcagcagtggagactgtcaagtttctcctgcaagagggcgctatctggaacgatctagacgcgaacaacgagacacccggctgtatcgcgggccgcattggcgcttccgagctgtacgagctgatcgtcgacgcaggtgtccgcgcagagttgttgatgaaccgcctcgacgcgtacgaggagctatccgatgatgacgaagaggaagaggaaggcgaccccgaggccgagacagcaccggaactcgtcgatgcatccgccgaacccacgacagaaaccacaaccacaaccacaaccacaaccaccccggccaaccccgaagtatccaactcgcaatatcttgaatcgcgcctgaacatccaaaacgaccggatcctggacgcagaccagaacggcgtgatgatgcgctgggaaagcgacattatgcgcaagtccgcgatagcactgctcccgacgcccggcctgaaagtcctgaacatcggtcacgggatgggcattgtggacggattcttccaggaacgagggccggctgtgcatcacattgtcgaagcgcatgaggaggtcgttgcagagatgaaacgacgcgggtgggatactaagcccggtgttgttatccaccagggtcgctggcaggatattcttcctgaccttgtggcggctggggagactttcgatgctatctactacgatacctttgcggagtcatatagtgatttccgggacttcttctctgagcaggtcattggattgctggagcaggagggtcagtggggattctttaatggtatgggtgctgatcgccaaatctcatatgatgtctaccagaaggtggcggagatggatctcttcgaagctggctttgatgtgcagtgggaggagattgccgtgcccaagttagacggtgaatgggagggtgtacgccgggcttactgggttgtggatgattatagattgcccctgtgcaaattcatggattaagggagatcttggatgatttcatggaaaggatatttaaaaaaaggacattggatgtctatgactgaatacgacgctttaaaatgctacataatggctgaaaggaacaatgtacaaatgttatcacagctgaatcaaatccacctccgagaaatctggaggactgcgactgaagatcgtccgacatttgccgtctagcgcctggtactcattgctgatccatatatgtttgctaaaccgttgtgttcggtacacttcgtcatcactcacacccagatcatcacgcggaatccagatgacaggccgcttggcgcgaagggcctcgtgctggaaggcacgttgcaccagctggtcacgctcatcgggcgtaagatcctctaattcgtcgtgaataccggcaaagagggcttggccgactgtgctgggggctggtgcctgggcctcggtgtcttgggccatcttttcccgcatatcacgtagtgttggtgtggaggttgctgagttctgaccgaaaaatttagatttccggtttgatgagctggaggcccatgatggacgtttgtctccaagcttgggtgctgacaagatatccgagttttgtcgcatctggtttgggaaattggtctccagaggtttcagctcgatgtcttcttgcatctcctttatctcctttccgtgccggcgctcttcttgttcacgcttggcgagggagccttcgatatcaccatcctcgtcatcgtcatcgtcaagagcgagaccgaggcgagcgtgctgagcacgacgaaactcttcatcacgtcgaacagcatcatcttccaaggtaacgggcagataccggatcagtggattgaacgcatcgttgagaagaatttggtaaccggccgtcaaaactagaacaacaatcatgcaaatagcctgtcccttgcaggcgacatcgtcatccgcgttccgaaccaagaagaacaagccgattaggcagacttccataacgtagattcccgtgaatagctgattaatagctcgaggaaaaagaaggccaccggtgtcaaatcgaaacttagtcacatagagtgtgttgtagcgatagacgaaccagaaaaggccgaaggtgaggatgttgaaaattagaatcagaggtgcgatcacacagtagatcaaaccttggagaatgttaatcaacggattgtatcaaaaaagacaagacgacttaccaatagaggctagggtggtatagacagggaagaatgtaccccattgcatctgattgaggtttgttgttcgtgcccacttcttccgggcagtagagtccaaaattggagctagaatgaaccagctcaccaggccaaagatttgtacaagggcgccagcgctcacagacatggcttgtagaatcatgtaagagaagaagtagttactagacttcgggatgttcactgctaggagttgtggccagctggttacatcagtgacattctcaatgatcgtcgagaaactggaagcgatggtgacaaccaagaacaattgcacaaagaggaatgcaaaataatagttctggacagtgagctcgatggacatgccggtgaagaggccttgcgtgcggctcaaaaagcgaaggatgagagggagcagcgccatcagaatagctaaacacagcgcaggaagaataccctggatggcagaaatgaaccagtctggaagcttgccaagccaggcaagccatggaaatgcaccctccagatatgccaattgtgatagtagtccggtgaaggcgacggggaacgcccatccaacgaccattgcgcaaactagtgtgatgatgccgaaggaacgcaggtaccgttcccaccacttgatcgacatattatcccaaatcacatcatcgggagatatttccacgactcggggtgccatctgcttggggagatggtgactgacagcttgacaggccatgtgggcagcgacttggtgattgaactggatgaaggccgagttcattaaagggaacccctcggggtgctgctgatcgacttcgatctccagattcagacgagcgagctcctttcgacaataatcgatggtgtcaaccttttcccctagaagccagatcgaaggcatccaactccagccaaatatgggtagacgcatggtatctcggtccttcggccggatgtattctttccacagcggctctccgtagtcttcattttcgaaattttcgttataggcgatagggtatctttccccttctatttcgtctccctcctttcgagcatgctcgtgtttttcgttctcggatttctcgaagtcacgataggtggcatgagttgcaggcgtttcgggtgcagtcagtggatattggtcagcctcgcgtacaccctgcgatcttgtattagatgacattcgtctccagaatggtggcttcggcggatcgctgcacatggtggcatcctggtctgtattctgtcctggatccggtcctatgggcttccctaagttcaaactcaagtgctgacttcgccggagccccacgggtttggcgggttttgtatcagattggctgccagaggcaagaagacctgggactggaggggtgtttgcacgaggcggaagggtgtctggtgttgcagaatgaccgggacctgagggggtatttgaacgaggcggaatgatgttatctgtagttgcaacgaagcccccagttcgagataacggtttcttgaagcctccaagcactgttttgcccagtttccctaccccttggccaaccgccccggcggcggcaagggcagggtcaaacattcgaggtccgtcctccgaccgtttctcttggggttttctgtggagcatttcttgtactgtatgggcctgatgaggattaccagagctgataccaggacccatagccatttgagatgcccgtttttcagccgtcttttgctcttttttctctgcacttgattgactctcgccggccttctttgcctccgccttggcctttttgagctgtgcctttttgcattttgcaatcaattctgtctcggcgctttcaagcttgagagcaagatggtttcgtgctttcactttctcgttcaagtcgtcgaagttgcggttgagccaaatgtttcgcacacctccagggaaaacatcgaaaagcctgtcaagggcatccatggtgagccaatcaggtggaatagaagtaacgagcacagtggtagcagaagcacggagtcgatgctggggagacgtcaagtaggcctgtcgcaggcgaatgtaattccgaagttcatcaaaaaacacagcacagacatagataatggcaatcacggccattaccaaatgagcccaataccgactcgtgtgctcaggggttacgttaccccatgccaactggtccagaccagtgacggaatatctagtgcctgaggtaccattttcgtatgtctggcccttgccaccagcacggtttattggaagtagaacaggtaatatcacgaggcccagaggaaggaagatcttcaaaagcatgcgcagatagcgcaggaagaagtatgcatcaagcccacatttctggatgaattccgagctggatgtacgaaagactgggacaatccaatggaagaggcctggcggagatggggttgtgcgttctctatctggtaccagataggttcgcggttgactggatatcaatttcggtcagtccaacgtccacgttctcctttccagtggggtttcaggggacttactatatacggcttagtttaccttttagtaacagaaagaggagaaattcaacgacgaaaacgacaatggccgtcgccagcgacgccaggaaggtcgagattgacacaccttcggcggttcggccgtggccgccagtgtgttccagcgcctcctccaagcccgaagtcatgacgatcagctcgggtattgccgagggaaatggggactaggacgctaataggggtatcgaagaagatgtcacggcaagaagcatcacgatatgtcgttgtatgcactgatggatgtcgaaagtaatcgcctgtagattgaggggttgaataagaaggagctctctgataagagaagaaaaatcacaaagagaaacccacttgcgcagacctagggcgccaacctgatcagctgtgggggacgagagccaataacgtcgaatttggtctttgagtaatatcttggtttatgaggtgagtggcgcgaggactgagctggcggtatgatatcaagaaattaagacgttgacgaacagggatgattggagggatcgtgggagcgccgatcgaggatacaatgacatcaggcgctaagtgaaacagcccaaagaagtcacggcagctttagatagattctagtggaaggagaacaaagattgctttgtgtaaccgagcgcctcggaatttgatctatatttataacaaggaatagctccttttttcccaactatgacaacgttgatactgaataacattgcgagacccctactacggtagtattgaagcttttagtggggagaaaaaaagggaaagagcggtgattggcccctgagtcgaaggtccactgatgtggcagtgcatttatgtaattcgcaaagtccaccagccacagggtcaggaactccacgtggctggcgggcaaannnnnnnnnnnnnnnnnnnnnnnnnnnnnnnnnnnnnnnnnnnnnnnnnnnnnnnnnnnnnnnnnnnnnnnnnnnnnnnnnnnnnnnnnnnnnnnnnnnnnnnnnnnnnnnnnnnnnnnnnnnnnnnnnnnnnnnnnnnnnnnnnnnnnnnnnnnnnnnnnnnnnnnnnnnnnnnnnnnnnnnnnnnnnnnnnnnnnnnnnnnnnnnnnnnnnnnnnnnnnnnnnnnnnnnnnnnnnnnnnnnnnnnnnnnnnnnnnnnnnnnnnnnnnnnnnnnnnnnnnnnnnnnnnnnnnnnnnnnnnnnnnnnnnnnnnnnnnnnnnnnnnnnnnnnnccccggccacagggtcaggaactccatgtggctggcgttcaaacacgtcggccgaaaggggaaaccacttaacgcgtcggtcgcgtccacggtggcagaaaccgcgttccgcccacagctttttgctctccctttcttcacttgtatcccatagaccaccaacccacctgatcatcgtctggtatcagcacaataattcatatccaccatgtcgtcaccaacacaaagacggagtggtcgctcctctaaaaattcaacttcatcgcctagttcttcgtcccgacaggagcctcctagcagtccgacttttcaagcaaccccccgtgcctcgagacgtccattggctgggggagccgcaccctcttcgtcccccatttttttccaatcatccccgacgaagggaaataacaatgccgagactccagatgaacgcatggccgatgccagctcaacggtagacgatggcgacagaaccccgcggggcaaccccggtgtgagaggtacgaatttggttgtatcagagcagcaccttttgttttcttttccaatattgatccctaaccgcctattagattcttctcctattcattatattccaagttctagcccaactcgaggcttcggtcgatctgatatccgatccgacatccgctccgatgcattgagcagcgccagcagcggattatttgtgtcaccgggaggccagggccgacggggaggtcctcgtcgcagcgatttgcattctgggggctttgggtctacttccggtcgccgtaaccgtgtgttcgttgacgccaatggaatgcccacaggtgatacaatgcctcgctctgatgccactttctcgaatatcaaccctggcacctctgaagctgaagccatcgccggaaattccactcgtgtgatctggggcaccaatatctcgatcatagattcaatgtcggcgttcaagaacttcctgtataatttcgccacaaaataccgcctctgggctgacggtgccaccgaggacgaaaccagactactgggagaattagcggaaagacatgagtgcatcaccatgtgtaacaacatgcgacgactcggtgtgaacacattcaatctcgatgctgctaatttgaagtcatacccattaacccgcaagttgtggcaccaactttccgcatatccgcaagaaatcatccctcttatggatcaagctttgaaggatgtcatggtcgatcttgccctcaaggaaatggacgttcttcggtcagagagccaacgcgctgctcagcctcgtgaccgacgtggtcagcccatcctcacttcggacaatgcgattccgactgtcgatgtgccggatttagttggtgaagtggaggcgatgaccttcaaggttctccccttcggtttggatcaaaccgtgaacatgcgtgatctcgacccagccgatatggacaaactgatcagcatcaagggcttggtcattcgtgctactcccatcatccccgatatgagagaagcgttcttccggtgcagcgcttgcagctatggtgtgcaggtcgacattgatcgtggcagaatcgccgagccaacggtctgccctcgagacggttgcaaagaaaagaactcaatgcagctccttcacaaccgttgcaccttcggtgacaagcaagtcatcaagctccaggaaaccccagacaacattcctgacggtcagactcctcactcggtgtctttgtgtgtctatgatgagctagttgatgtttgcaaggccggtgaccgtgtggaggtgaccggtattttccggtgcagtcccatgcgtgtcagtgctcgtcagcgctcgcagaagtcactcttcaagacgtacatcgatgttcttcatgtgcagaaatttgaccgtaagaagatgggcattgacatgtccacagtcgggcaagaaatgtctgagcaggcggcagaggcagatcaggcgcgcaaaatttcagccgaagaagaagagaagatcaagcggaccgcctctcgtcccgacatctacgacctattgtctcgttccctggctcccagcatctacgagatggacgatgtgaagaagggcatcttgctacagatgtttggaggcactaacaagaccttccacaagggaggtaatccacgctaccgtggtgacatcaacgttcttctgtgtggtgacccctcgacctccaagtctcaactactgcgctatgttcacaaaatcgctccgcgcggtgtctataccagtggtaagggttcgtcagctgttggtttaactgcctacgtgacccgcgacccggacactcgccagatggttcttgaatccggtgccttggttctgtccgatggtggtgtttgctgtattgatgagttcgacaagatgaacgattctacacgatctgtccttcacgaagtcatggaacagcagaccatctctatcgctaaggcgggtattattactacgctgaacgcccgaacatccatcctggcctctgccaaccccatcggcagtaggtacaattctaaactgtctgttccgcagaacattgatctgccacctactctgctctctcgtttcgacctggtatacctggtccttgaccgtgttgacgagacggaagatcgtcgcctggccaagcatttggtcggcatgtatctagaggataaccccgagaatgccagctcacaggagattctggtaagtgccatttccccggatgatcaattcgcgagatttctaaccgttctctctagcctatcgaattccttacagcctacattacatacgccaagaccaattgccaccctgtgatcacccccgctgccggtgctgcactcaccgaggcctacgtggctatgcgccagctaggtgatgacatccgcgcccaagagcgccgtatcactgccaccactcgacagctggagtcgatgatccgactttccgaggcgcacgcacgcatgcgtctgtcgcccgaagtcaccgtcggcgatgttgaagaatccgtgcgtctcatccgctccgccatcaagcaggccgccaccgattcccgaaccggtctcatcgacatgggccttctgaccgaaggcagcagcgcctctgaccgtcgtcttcgcgacgacctgaagaaggcggtgctgtcccgccttgatgaacgtggcggtgtgagtggtggtgcggtccgctggaccgacctgtatcgcgatgtgagcgagcagagcgacctcagactcgaccacaaccagttcggtgatgcgctgcgctcactggaggcggagggctccgtgaatattttcggtgaaggtgctcgtcgcagtatccgccgggcggccatgagcatgtcctaggtggctgcgatgataccatgatgtgatgatagattaggctgcatgtcgtccttgagggtgttctggtgttggtgtttcaatgggtaatgatataggattcggccccggaactgttgtatatggtagattgatcaataataatatttttccaatctcatgagttccccaaggttggctttgctagagaccaagacatgtggaaaggtgagaaatcacatgcatctggctagacccaacaagcacaaagcgggtgtggggctcgatcatcttgcagatggccctgtccatctgcaacgagcattgaaaaagaaattgaaaagcacgtttaatattggactgtgtaggttctagttctatagattgtgtgtgatataataacagggccttggaatggccctagacaatagaacaatcctgcgcagtgagagatcaagagaggtcaacagagagaaagacgaggaagacaccacgtgcgcccatgactggccggattgttcacgtcaccaaggggggtctgtattgcggatacagcgttaccataccataattaccagaagtacatctcgattgccacgatcgtgctctttataaccaccagtatagcaagttgatgcttattttaaactcactacggttaaataggatactccaatgccattcagctattcaccatgttgagctccgtttaaacgattgataccatattctatcgcctcgactattaccacacccacttggccacgatggggccgtcacccgctagtcatcggactagccgagttcgggggtccattataacctcttttgactttctgtcttcggataagctgaactctccgaatttggcctctccctgcctccctcacaccttttttctttcttctttctccttctctttcttcttcccgtcatgagcttgggataaacctagactccctcacatttctccttgcccaccatgaggtatcgaattccctgtctcgctgtcttccagccaattccactccccgcgcatttatactgactcaattgtctcataggttcggcgaatacctccgttcttccatgataaaggaattctatccttactacattgcctatgacgatctcaagaaagctctgaagaccgatttcgtcgacgagccaacgtccgataacaccaagcccgcccgcaaagaatggaccgaggacgatgagacaaactttgtttccttgctcgagagtgaactagagaaggttttcttgttccagaagcgcaagagcgaggagattgttgcccgcattcaagaaagcgagctcgcggtgaacgatgtcgtctcccgtttggacagctcggccgattcccgtcgccagagtattcgagcttctcgccccgcgcccaccgatgcggatttcttgatgcttgagcaggtactcagtgatatcattgcggatgttcatgacttggccaaatttactcaattgaactacacgggtttccagaagatcatcaagaagcatgacgtaggttttccttccaggtcgcccctatcaattcgctaacaattgcacagaaagaaacacaatggtacctcaagccagtttttgcgacacgtctcaaggccaagcctttcttcaaggacaactacgacgccttcgtgattaaactatccaagctgtatgacctcgtccggaccaagggtaacccggtcaaaggtgattcgtctgctggtggtactcaacagaactttgtgcgtcagaccaccaagtattgggtgcaccgggataatattacggagttgaagctggtgatcttgaagcacctgccggtgttagtcttcaatgccagcaaggagttcgaggagaaggacacggccatctcctctatctactttgacaacacggacacttgggaactgtaccagggtcgtctgaagaaaacagaaggcgctgaggcaattcgactgcgttggtacggtgggatggaaagtgaccagattttcgtggagcgaaaaacccatcgcgaggactggacgggagaaaaatccgtcaaggcgcgcttcgtactcaaggagaagtacgtcaatgcctatctcgacggccggatgacggttgagcggatcttcgacaagatgcgcagggagggtaagaagagcgcgtcggagattgatgatttggagcaactagctcgcgagattcagtaccgcgtcattacccgccgcttggtgcctgtcacccgtacattttatcaccgtactgcattccagctgccaggtgatgcccgtgttcggatctctctcgacacggaactgaccatgatccgagaggataatatggacggccgtcaacggtctgggaagaactggcgccgtatggatatcggagtcgacttcccattctcccagctgcctcctgaggatatcgaccggttcccctatgccgtactagaggtgaaactgcaaacccaggcaggccaggaacctccccagtggattcgggatttgactgctagtcacttggttgaggcagtcccgaaattcagcaagttcatccacggaacagcgaccatgttccctactcgtatccacctacttccattctggttcccacaaatggatgtagatatccgcaagcctgcgactcgtcaattcggtatccacagaccgctggcgagtacctcaatatctgccaatgatgaagattcggatgatgacgaaacgccgagtgcgcaagagacgcccccgaacgaacacgccaccgagcatcaaaacggattgtttgagaccaatggcaacgaactagatatcgaagaacgtatcgccgctcagcccttgcccggtgacgaagactacccattgtacgactcggatgacgaatctgtatactccgatgaactcgaagaagctcgtcgtgtaggaggggcgtactacgcgcagaaattggccaaacattatctctctcgggctggtcacgctgtcgcacagggtcttatggcgttaatcccccgcccccgtccaacatccctgcctccccccgaacagcgtggcatcgctgtcttgagtaaccaccgacgcaccctacagcgattccaggctcccccgggtaaacgtaagtcggctcaatgcatcttgtgcatcaattccccagactaacacacttcgcaaaaaattaggcatcttcgttcccatccgcgtggaaccaaaggtctacttcgctgccgagcgaaccttcctctcctggttagaattttccatcatcctcggtggtatcgccgcaaccctcctgaacttcggcaccgatttcgcgaccctcatctcctcctgggcgttcaccatcctcgctgcgggtgccctcatctacagtcttttcctgtacatctggcgcgtcgacaagatccgcaagcgccgtgacgtcaaacgcgtctactatgagcgctggggtccgacagtcgtcagcatcggactggtcgtaatcattttagttaactttgcgctgcgcgtgcgggaaggcgggtttatggctgcgccgggatcggaaggcgagcctcagcacggcgggcatggggaactgtagaactcttggtttgtttggaaaagaagaacttaatcgttctctttgttttattgggttgaccaccttctttactgctcattggctaggcgcctcttacgtttgtatctactggtggcttcgggctggggcgttgggagattgtaaatcatgtacaaatcgcatacataccattgcaaatagtgtgagaatggcactcgattaccgatttctttgctttcgttttgtagatgttgtaaagtacaaattccagggcctgtatctcataagcgagtgacaacccagaacgcgtccatgaatcagcaatattactaaggataggatatatcatcttcacaataagctgtaggctgagaaggtgagttcagaaagacatcttcgaacaggttcccgaatggaaacgagaaaggaaacgccatgcccatgccgtcttgcgcaacttgatcaaataagcctgcagtggggttgatactaccagggttgctttcgttatcaagttgactcgcaccatttcccatcgaggatcctgttgctgaatgctctgctacccttgcgccatcttgtgtctgcccacctgcagagtgtcgcctaagcagggattcgtaaattggatagaaggctgcaagtaccgggaaccgatcttgcaacttgtcaagtatcagcatgcataactgggcgcgatggtgtgaaatccatcggacaccagtatcccctctgtgtatgttgacaatatagattgagagcacagacagcacgggtgcaactctgcaaaggctttagcaaaaccgccccggatcgattgggggtactttattatggaggcgacgtacatgctagctgcggctgcatagagaagatcacttgccatgagtatttctagcatgttgtagatctccgcacatatctcgaatgtcggagtgcctggtccggtattgagagaaaaccttgggttgctccgatgcaaaagtagccggtattccctatagattcagaatcagaatggagatattttgaagagccatttgaaagtcaacttactggtataatatatgagtcaatatagcccacttgctgctacttggcgacaacgacttgaattccggggaaagggatgaagagcacaacgagatttgctctaaacagatatcttgtgaatggccactatcttcgtcaaatttgatagtgaagaagcgatccactgtaatatatattagcaaggaaatacattcaggaatatgatatgatgatggatgttgaacctgtccgagctagttgcacagcatttatcacaaaggtatttgcctcatcggggtatcccacttgagacccactggcttggtcaaaatctgcttccgacagaggggggacattgcaaagtcttccttgcacgtgtgggggacgatcgagaagcatagacagatttatgtccatggcctagtttagaatgtcagaccgtgatagagctggggctttgttgagcaataaccgacatataccatccaccataatcttcgccataattttcgttctttctcttcgagacggttatatgactttctggaatactgatcagccgcccttggctcacattggaggggtaagtagactcacattcgatgcagtcctaaagcctgcgccattcccacagagataccaacccagtaccaagggtctttgtgttctagaagaccattccaccaatagcccataagaaatgttgattgaatcgtcgctatcgcatcggtttcatatccagcatcgtacagagatttggctctctggtaaaaagttaggcttgcagcgtatcgggacacaaatccggcaccagcaatgacggaatccgaacaatttatagtggcagcgaggtagatagcattcaagagcaagtgtgaagatttgccttcctcgagagtgacaagaaatcttgacttatcaagaataggtgcagcaagtgagaaatgaaagtaacaatcgagaagggcctggctcgtctcttgtgacggaagatcaaatgccccttggttcttgattcgctcaatagtagatatgtgaagcttttcgatttcttgcgtcgtcggcctgcccaaccgggccagcattgccccgtggaggtggtcctgaagtgggcgagcatccgtcgtacctacgaaaggatttccaaactgttggatcaaataattgagattggaagaatctccaacatatggagtttttccacttgggccttgggctgggaaacatggctcttgccgtggcttatctccatcatcttgagcatgagtggtcagaggagggttggaacttgtcagtccttcatacggcacattgcgggaggcctctgaaagatcactgcctaagtctgcttgagtggtcaggggaagaagctttcgtctcctgaatctgaattagtcctagtatgatggcttgggtcttgaatcctaccgtccacgacgagatataatcaactcacattggcgccgggcattccgacagttggaacacgcgacaccttcactgcggtcacatttgacccgccggtcatgacacagacgacaagcgattttgactggactgctgcgcggcatttgataattgtcaaaggcaattgtccgactctaaagttcggcgtcttgacttcggcgaagttggtgagcgcagacccacaaagtcgccgaatttgggcttatctgattggatgtctattgatatctaccctctcattgggtgctcaacaccaacagtttagaacgaagtataaaagttctccaaggaggggtttttactcaaaccagcaaattattcaagttgctgctgaagatgctttcgaatatatcctctcgaagcatgctccgtcgctccaatccgaaacaatggtcacagtgttgcttgcccaccgccgcaacgacacgatacctacgcacatcttcagaacctggtagctctacatctgcacccgtaccattcaaaagccagaaagatggagcgtccgggtatcttttgtaagtccgatactgaattgccaacttgcaacccgactgatttatagttctaacattttctacctagggcaaaggcagacgaattggttaactggggaagacaaggttccctttggcctttatcatttgggctggcctgctgtggaattgaaatgatgcatacctcgatgccacgttacgatcaggaccggctgggcattattttccgtgcctcgccacggcaggccgatgtcatgattgtggccggtacggtggtcaacaagatggctccggccgtgagacaactatatgatcagatgcccgagcctcggtgggtgattagcatgggcagttgcgccaacggcgggggatattaccactatagctacaatgttgtacgtggtgtggaccgcatcgtgcctgtggatatttatgtgcctggatgtccaccgactgctgaagcccttctgcagggtatttttcttctccagaagaagatgcggaggacgcaggtgacgaggatgtggtacaggcgctaagcgagggttgaatgagagtatatatatcctactactcctgacgccacggaagatatgcaacgcttcaaatgccaaaaaccgtgatattcattcttccacctcgaactgcatctctcgctctataatatagatccgtcagtatacacctagaacaaattctctacaaataacaacataccccagatcttggtcgcatgtgcaatgatcgtctcagccttgaccagcaatttcgcagcatacctctccgtctctgtcgggtagagttgacttttctgcgctttgcgaggattggcctaaacacatcaaggacacgtcagtagatgatcacacatatgtatagcccagcaatcctcttcaaggtatcccaaaaaagaccaaaaacccaccatcataagaacaggaaccaaatccttcggctcagcctccgccaaagctctcaaattcttaaatccattatccctgagcaaacgcgccgtccaactcttcacaaaagtaacctgggccatctcaagcagatccgcgcgcgcgccagcctcaagcctatcgcgcatatgatccaagacggctgccatcatgccccagttcatgcgctgacagaatttgaccatgccggcggcgaagccgtggcactgctgtgccaaggtttgaactgcaccgcggggggtgttgtagcgttgggctatcgttgatatggggacttcgttgctgagatcgcggagttgaagggctgtgtaggcgcggcagtagatgcgggcttgttttatctggactgcggtgttttctttcagggaggcgcctgattgggccctgggataagaatgttagtttggggttggtctggtctggtttgttttgagggtgggtgtagaattgtgtgcgatatgtgtaggagcaatggagtagcagagggaaggggaggcgtacattgtgttgacgaaacctggttggactccgactaattgtagagcccggagaccgctctcatctagcctgtctagctgatcgcggaagatttgccaatcaatgggggtgttcacggctgcttggagcggagtgaacatgtagaagatgtgcatgtcaccgtccatgacaaaggcctgtaatgctcgtttcagctcttcgtgaacgaacaggccgtcttcgggtgaaaatgccgaagccacgattgcttgtcctaatggtgtggcttcgtaggattcgtcgtttcgcaaaataagaaggtcttcgtcgactagttcctgaagagcggatttcatgatgctgtatgcgatcttcttgtccaacgtttggtagagaagcgtgcaccgaacatattccttgatcgcctcgcagccggacaccaaccccgttgccacggcttcgagtaaggcccttttggttgtgagcgaatgattcaggagcaataaatagagtagaacaagatacataccgcttgaggcctcttttctcaggtgccaggcagctctcaatagctggcatatcagcgtccaacagatcgcagacagcctgcatatcggctttcacgcagatgagataggtctcgccagcgttatccttgcctttgcggccagcacgaccgcacatttgacgactaattttgtcagcttatactccttactccaagaagaaggtacctacaacatagccggacctactaattgacgccccatgcgcgcaccattgatgataactcgtctcgccgggaggtttacaccagcggcaagactgcacgtggccacgaggactttgagcacaccctggtcataggcctgtgcaattagctcccgctcttcggtggtcatcccagcatctaagtggttattagtaagcgtggaaactggccccatggatggatatgtactaactgtgaaaccctgtccctctgattattgttgtctccaaagccgggtccagtccacaagcgaggctccgcaattctgcaagaaggtcgagtcgtttattcagctcttccggctccgccggcggcatcgcttcaccgatagtcgcagcgtgaatttggcatgcgttacggctgccacaaaagaccaatgacccaaacccagctgctgcagtttcgacagctagcgctaccatggcattagtggcagggttgctgagctgcttagaggtagaaggttcaattattcggtgtggaggaatggtatcgtgtagggacgcagctgcagtcagcttagatgccgtatggaacaattgccgcgaggttgcagctgggtagattccattctcgtataccaagtattcctcaataggaattggtttgtatgtggagatgtagaacttggcgttcatccattgtgccagcacttcggtgttctgtacacctgttagagcagcccaccgagggcttgaaccatagacttacagagagtgtagcactcatcccaacaatctgggtgtcctgctgtaataacagcagcttcgtgaccatcaattccaagagatagccccggtgttcgtcatcgagcatgtgtaactcgtcaagaaccacgactcccaggtctccaacgctacactcttcgatggtgttgtttatcaacgaattggcctaaggaaataaatatcagagctctgcaaacaacactgaatcttaatcgtgcacaccttctctatcgtacaaacggcaatatcagtatccgcccaagaggctgtcgtccgacttccgccaaagaagcccgtcactctgatattcttgtgcaatttgttccatcgcctgcaaggaaatttggagtcattttcatcatcatccgggatatttctttccacgtcttgcacaatgcgacgcatccacttgagcttctcctgaaccaaagcaacataaggcaaaaccaacagcgctttgcgccctgggttttcgataatgcgtttcaaaagcagaacatccgcaacaagagacttgccaccgcccgttggcgccgtgtaaaccaaatgacgttcaccggagagtaagcccctggccagcagacaagatgtctgccatgggtagatattcctaacaccgagagcggcaaaattcgccgtgagagcgggcggcagaccatactttgggttagacagagagagcagggggttctgactagaaggtggggcggtcggtgccacagcttttggaggatcatccgaggttggctccgcgcccgcgcccgcgccaagatgaatcttgctggcagtaaagcgatggacgggggcgattagcagatctcgggcagactgtagcggagctgattccaatatggtgtctgtattgccattttgacgagggaaagtagcttgttttacgactggaccgggcgggatgtcgagaacctgctctgtgggctctgtcgggggtcgtttctgtcctgccacgggcgctacatgatacgcttgtcgacgggcgagatcaatggatgtctggaatccgcgagactggacttgatgacccgttgtcgacatgcctgaaacacagatcgatccattcgtctggggaggggataaatccagttgtgtttaatcaaaattggccatctctctgactttgaaaggtttatgttttatttgatgttgtttgccatgtttttcacggtttgttgtttttccaaggttatctagtcggcttactattcgttgttgctgcctgaggcatggattatatcagcggttatgtcagagatcacgttatgtcatccactcagatccccccggggctgggccagtcaggtctagttaacttgatgttcttagacatcgatgatcgccgcgtttccaataatgtgcgcattacgggattattactcgtattgcatgcttccatgctcccatgctcccatgctctgcatgattgaactgtagttccaatatggccaccatggagtcccttgctcggggactacaccaaccttgtacgagatcgactgtggaggcttatgtggatgccgtcttcccagccctggagcccttgagccctgatgattgcccacaagtacgttgtagaaacgcacaatgaccaaaaacggatattcgtagccccatacgtgtcaatggatgcctgggaacgattggcgcaattatcgtgtgtcgtcggagccgagagggtcggctgacgatctggggccaacggtgatggatttgcctcaacgcggctagaagacatcgtggcatcctcggaacctgcaacatacaacatccacatacatatggaattgcatgcatgttgacttagccttgccagggggaaaaagaggaaagttccaaaattccagtgcccatcccaagatcaagtatattgtacagaatctgagacccgatcggggtggaggcgtcataacgactgtatcatgagtcgcgcgtaccacccacctatgcattaggattagcaggattagccaaattagcaagattgtgaagtttcagtattgtatgacgataacatggaattcactgaccatgcatggtgggaatgtgatatagatctcaatctgtatcctttatttctctgtttcccctggacaaagtcacaagaaacgtctcatggcaagcttgataccacgagcgaaccccctttcaagccaccgtacagatgatggctgtaatggtcgggatgggttggatctgttgttcggaggtctgatcgccgcatacaacatatatctcccagatacatctgacacctgatctcactccaaccctaacacctacacagctactccgtataaacagcacacaacacacatgttatattggcttaaattgtcccggtcccatgggtggatttcccaacggagtaggccggcacgttatacccaaagagttcagaccttcacggtcctcggctagttctcggcggcatcgatcgtcattggagagaagtttaaattacctatattatgattaccctgatactctgatacttagtcctgtgtctgtgtattcccaattcatcgtctatccgacaatcgcgcctcaggacccaccctatcctaatgtacacgaatttatagatgattcccccttttgcctctcccgagatgcgtagccaatcccggtgtgtttggtcgcacaagatcaggcgaacggggaaaaatcaccaaaatagccaacatggcaaataagaaaggtactggccatgtattcctggtaattttccaatatcagtccccagcgactctgtttctaggtagcagctcccactagacctccatataaaactattcacatcccctttgacgtgctgagtagacaccgttccgcataccagcattcctgtctagtgtacgtcggaccactgatcgaaatatccagtagatcgagcaagggaggtccaaatgaggttctggttccccagggcctgtccttggggatccgtcatattaacatattgggactaggggccaggttcgggatcctcgacactttttgcttttttccgttttccttctcttcttctcccccttccccattccccgttgggctatatcgtcttttttttgccgctaaatcacttttgacccgcttctcccgacccatccctccctccactctatctactcttctctctctactcttctctctcctcctctcgcctttcttctattctggtcttctattcttctattctcccctattcatctcattcgagttggccttttcgattcattttcggtaagctccctattcttccttgccattcgtctattagcttgaagaagtcccctatcaatgttgttcctttcactcttgatatcggaaacacccttcacccctgcagagaaagaagatctgacacggtccactctttgtctttcccacttcttttcgcttttcccctttgcaactcccttgtgaagttcttcgtctggaccggtgaatcccatatctgcccacttacccgtattttgagattttcgcccttcccactttcagcttgcattcttccattgagcgtgtcctcttcccgcgttttctaaagttccaaggcgacgggttcccactaatcacccgccacagcttcctctgggcttgatcttttcacttcttacatcttcttccccccattccatcttcatttgcccgtggatgactaaggacctcactcaatgaccactcccaactctccggaggcagtggccgattcggccaacggctccgccaccgcgtatggcacgcgatcgagaggtcgtaatgcccctcggccaaattacgccgaggaccgtgacctggatgcggacatcgatctctctgctccaaactccaagtccgccaaaagaaatagcggcgtggcactcaaccacattgtcaacggcgccaatcacgaggagaagacctcgtcggcgcaaccacgaaagagcctgaccaatggtcagagcgcaaatggatcggcaaaagatgccattcctggcacttcttcattttccgccagaccggatgatgtgaatggatctaatttgagaaaacgcaaacaacccgccagcacgccacattccacccccaactcgggtggtgccgtgaagaagatcttcaccacccctccaggcgattcggaagggggttatttcaccaacatgatgagtttcgaaaactctgggccctatttgcaggatggccaattaatagccgatgatggcaccacttttgccctcaatggttagcccctcacttccttcaaaagtgattgttccaagactaataatttttatagaccatgtttatttgatttgcgaacctccgggggagccatattatctagcgcgcatcatggaatttctgccatccaaaaccaagccgggtggcttcattgaggcaatgagagtcaactggtattaccgcccacgggatatccagcgccattctcccgacactcgatttctctttgcttcaatgcactctgacacctgtcctctttcttcactacggggcaagtgtgatattcgacacgtgtcggagattgaagaccttagctgttacaagaagacgaggaactgtttctggtacgacaaaatgttcgaccgatatatccatcgtctttacgatgtcattccgactaaagatatcattaatgtcccgggaaacgtcaagaaagtgctcgacgaacgctggaaattcattctggtcgagatcggaaaggggaaagaattgacgggtgccgtcaagacttgcaagcgatgccatttatacgccgcaacctctgaatcagttgactgtgcagtttgcaattcaacatatcacatgcattgtgtccgacccgccttgacaaagaaacccgctcgaggctttgcttgggcttgtgccgcttgcagtcgcgcccaggagcgcaaactcgaggcacgcaacacaccattaactggcggcatccgaacagatggcgaagatgtgatcatggaagaagaggaggaagaggatcccaataatgtggcgaatggcatagccaacggtacctccgccagtacccccgcagccgaggaagattccatgcctcaacccgcaactgcggaacagatcgcacaagccaaaatgtggccttaccgatacctgggtattcactgccgcgtggaggatgctctggattacgatgatcgaatttacccccgagccagctcccgtctaggaactcggcaccaggcagtggtccccgcttggccaggccgtccagttgagtacgtgaaaccccttgagacgaaaaagaaatcaaaggttcccggcaaaaaggatggaaagctctctaaggatgcacaggcagcaatggaagctgcgaagcacgagagggcaaaccgaccgaagtgggttcaagatgagccagtgggctatgtgcatcgtggtcaggatgagccgatcataatcaatggaaaacagacgcgcacagccgagcttcaattcaaaatgcccagttctgatcagatcaccgcccgcggcgaagatgacgcacctggctcccatttaagcgatgcagatcgagaaaagttcgtcgacgactacatgcgccaagccaaggaactagcccctggtattggggttgagaaatacagcacaaatttcctcgacagagcccttgcacttctctactctgagaacttcgatgtccaggctgcccttgctaagctgaagaaaaccaacaagtacaaggatcttaaggagccccacatacgaccggaggaactcaagctattcgaacaaggtgtcgccaagtatggatccgaatggcgcaatatcatgaagcacgtcaagactgtccatatctatcagatcgtccgtttctactacatgtggaagaaaaccgccagcggtcggaagatttggggcagttatgaaggcagacgtggcaagaaggaggtacgccgtcatagcgtagtttcatctaaactccttgacgacgtggccgatgatcaggatgattccgcctttgactccgagaaagccattgtccagaagcgtggattccattgcaagttctgctctattcgccattcgcgacagtggcgccgtgcgcccctagttccccccggcaccgtggttccgtccgagccctcaaacaagaaagacaagggccctatgctcaccgttgcgctctgtcttcgctgcgccctcctatggcggaagtacgggattcaatatgaggatgttgacgaggttgcaaagaggattgcaggcagcggtaacaagtcatggcgacgccgaatcgacgaagaaatgcttgcgcaactgattgtagctaccgaaactccgtttgtcatcacccctgctacggcaactacggctactgcgatgggcattccgcttgatacaaaccctcgactcttgatggaaggaaagccggaaggaaaggtggaaggaaaggtggaaccgacgaaaaagaaggccaaggaaacgcccgctccttcaactgcgacatccgttgaacctatgccaaagaggaagacgatcccggagaaagtggtggaagctccaccgattgttcccgacccgccaaaggccaagaccctcccttgttcaatctgcaaccaaatagaaccttcaggtgaagagcacctttcatgtcgggattgccgtcttacggtccatcgcaattgctatggtgtgcgggattcgcgccccagcagcaagtggctgtgtgatatgtgctccaacgaccgcactccctcgatttctacagactacacatgtgttctttgcccagtgtcatggaccgaacacgacctcatggagacgcctaagaacaactcccggaagaagactgagcgtgacaaggaaaaggagcggatggagaaggagatggttgcggaggcgattaagctttatcgccagcgtcaggaggccgttgggaagcctatcggtccccgggaacccctgaagcgtactgcaggcaacaactgggcccacgtgctttgcaccttgtggaccccggagttgaagtatggcgatgcagaggagcttgagcctgcggaaggattcggatctattcccaaggagcggtggcgcgagacgtgtaaggtttgcaagtcaaataagggtgcatgtgtaccatgtagctttgctggctgcaatgctcacttccacgtgggctgtgctttccaagcacgctaccggttcggcttcgatatcacacccgtcaagagctcacgccgcgacagcatgcgagctattcgtctcggcgaagatattggagcagcgacacctgctgtttactgtccaaatcaccatgtgtccactgttctgcacgaaatcggtgagcagacaaaccagcatcatctaaacgctctccaattgttcgcccagacctacaagcaggccgacctcaccctcactggaaccgttcgcaaagcggcgtacatgcatcaatccgtcggagctccgccacacccttccaccaatgtcaaccgccgggcttcaacgagtactacgccggcttccagggatacccacaaagttcagccggtggaggatgtggctggagatcccatggatattgataccgacaaccatgttgcatcgcgaccggttgctcctggcgtggagaccaaccgcaaatgcgttcgttgtgccaccggctttagtcctaggtggtgggctattgggcgacgacctcctatggccaatggctctggacaccctcatcatccgccccaaggtcccttcccccaacaaaatggagatccttgcgaaatggcatacgaatgtcataaatgccatttgaagaatccggcgcctcctccccctccgcctgtaccagagcccacgcccgaccaacggccttcgccttactctgctcaacgccccatgatacccacctcacgaatgcctggccatccaggtcatccaggtcatccaggccatacatttttgccacacccacatccacacccgcacccgcatcccccccctaacggtgtgcttgggcggccgatgcctcctgctcacccatccaacggacttcccggaccaggatacactggaccatacgagcagcgtcacacgcccgatatcggtattcgcaacggcatgtcgccgtctccttatcccccggcacagccacctccccatcacatgaataactacccgccaccccatcctgcagggccattacctcaacactataccagtgctgggccttcgggacctccgccaccatattccacccaccagagcccgtatggccctgtgccggctcgctcgccgcatctttcgcagccaccgccgcgatcatatgcagcgtccgcatcccctccaatcgtgcaagcgacgacgatcaaccgatcaccccagacctcgctgagcgctctcaacggcggtccccctcctcgcatgtactccgttgagcgtgtggtaggagccccctctcactcaccaccggtgacgcaggcacgcattgacccgcgggggcccaccgccactcctcccactcgaccggaagatacaccaccttccctgatgggcgggccaccaagcagtcggcactctggggtcaacggtacagcgcccgggaccggagcgagcgcaagcccatcgctgaagaaccttctctcataacgatatccccctacacgagtgctcctaatcgagttgtatgatagtgacctttcctatttgcttttaccgctactgcatatgcatgccacggcatcacatgaacaaaagtgtgtccgcggttggattctcctttctgtgttttctctttgtttttctttcctttccagctacggagaccccgagcctttctagccggtagatccacctatcggccaccatctttcaccctttatcgtttcttcttttcttatgtgcttgttgtttttcggcgtcttgaattacggcacctgggaaaagtccgtggagtctgttaaggagcggttggggggcttgatgtcgtcgaaaatcacggattgcatggagtaggattggccactttatgattgatatcaccattacccatttttccagctagatgaattgttcaatattgctatgatctacattttctgattcttcaacaatcgtacattatccacttaggtgtccggcatattataaaccaacctcggaagctggcgatgctgacaaatgccgatcaaatgcggtcagttcgtcatagctgttccaaggttggcttcaggggatataaaatagatcttctgcagatatttgcatgaaaaacacccattgaacacttttaagcatcacccaaaatgagcgacaccatgcgagccatcggtaagtgagcgcggggttgaagaacatttccccacctgatatcatctacacttttggaatggaggatcatacatcaacccatctgcttcacttcattactattcactctctttcctctatacccacacctcgaatactttaatactctatacaatgtcaaccccaagactaacaaaccctaggcatcaagggcggcaaaggccccgcaacaagcctctttgtcgaccagatcgccaagcccaccgccgcagaaggcgaagtcatcatcaagatccgggccttcggactgaaccgcatggacctgcttcagcgcgagggcctataccccgtcccaccccaagcacccccaaccatgggcgtggagttttccggcgtgatcgagagcttcgggccggacggacacgaagacttcaaaatcggagatgaagtattcgggcttgcatacggcggcgcctacgccgagtacatctccgtctccgctcacatgctagtgcacaaacccaaagagctatcatgggaagaagcagcaggagtcccagaggtgcgtacacccaattcaatcatctaaaagaaaaacccgctaaccaccacccgtagacctggatgacagcctcgcaagctctcttcctaatcggcgaattccaagcaggccaaagcgtcctctggcacgcaggcgcatcttccgtgtcaatctccggtatccagctcgcgaaagacgccggtgcaaaagccatctacgcaacggcgggctcgcaagagaaaatcgacttcctagaaaaagaactcggtgtaacgaaagccttcaactacaaaacccaagattgggcggcggaaatccagtccgcgacatctggcgcgggcgtcaatctcaccatcgacttcatcggcgcgacgtatttccagggtaatttggacgtggcggcgcgcgacagttgtattgtcttgctgggccttatgggcggtggcaagttgcctgacggggtgaatattgcgccgttgctgtataagcgtgtgcggattgagggcagcacgctgcgcagtcgggatctcgagtaccagcgcaaattgcgggatacgcttgttgagcacgcgttgccgcggttctgtgatgggacgtttaaagtatttgtggagaaggtgtttccatttgagggcattgaggaggcgcataagttacttgagagtaacactactaaggggaagattatttgtgtttttgagtagattgcataacatcgaatatagagaatgtggaaatattatgtacggagtacaatatgtagataagctaatactaggcatagccaagagatcgacaaagtagaccccacccttgccatttacaaaaaaaaaagaaaagaacacatacggagtatacgcagtagtacatagctgtataatttgccaagtattgtaacataaactacatacatatatatgtaactagaacatatagcagttctaaaagtacctgggcatgcatgcagctatccctcgtgccgttgattggccgggttccccttccaatcacatggaagctatcagcaactgaaccgtggatgacatggagattagctaaggccacatagccacctgggcatattagcctaggactgtccattttatgtatgacgtgtatatatttgcatacattcaatattcttcttaatatagataatcaatgccctagcctgtgtcaagttaaaggtgaatgcatgcaattgtacctcctgcaggtgatccatttctgaaagtggagaacaatcgatgagatcacctcggattatctaatattccgtccgatttggccccgaatgggcccatcttatccacttttttcttttctttttctttttcttctgcttttttctttttttttcgattctgcagggtatgtgtattaatatctagtatgtacaatagggtattccaatgtagtatacaatacttgatgtattgtagctaaatcaatgaatacaaaattactacaactacctacatatatgtaaagtaatatatgcagtgagataacagaagttcgagataactatgtcgactgcatacatagctacccgaccgccctgtattgtgttacagaatctgtgcttactaacccacagaccttctagaaagaaggaaaaaagaagagaggcgtcattgggcccactggttacgatcggaggctctgcccaagaagcaatggtatagaggaagagacgaagacatagttgagagatgagtattctgctgataatcgagtaattagcgacaagtcaacatccctcaagatactcaccaaaattcaaatatacctgctagtgtacccaagaccaagattacttgaggatcatcccgtcccgccccaaggccttctggaaggaggaaagaagccccttccccgtgttcgcccctccacttgtcctcagctttgggtgtttttgctctttttaccaacttctttatttcacttcccttttcatcttttctttgtttatctcaccgctacacgctacacgcatacaccacaccatgtcgaattgacgtcctttcccgcctctcccttttgtgttctttcaccaattgaacccccttcgtcctcgacaaactcacgtgtcgctctcatcccatcgctcgtccgaatccgactccggggtagaaaaagtgggttgcgcgctcgatctgtctagtgcgacaagtctaggacaagtctaggctctgggggttgtctcggatcctccagtccataacgcgactcggactgcctcgctgcaggagacaactccattgttcgattcggtgacctgagagcgtgcttgccgactcctgccattccttccccgactttctttgtgccgattcaatcggatctttcccgacctcccatcaccctcattccagccgctcgtttttttcttttcccttttcacctctcataaccgtgctcgtcactcgtaccttctaccattcccctggtcttcgtcatcagagccatatgcgagccaggaccgctccgaccgactcctttcctttttcttcactccgattgagttcttgtcggtcttctgattccagcaagccctgatcgggggtcgttctcaaccttctaacatcatggtggaccgcgtggattgcgcgggcctgtacattgacgaccgagtgcggtcggagagatgggtgcgcaggaattccatcgatacttcaaccatctcgtgcgcgggttccttcgcgacacccgaagaaccggaggccctgcaagccgatgtggagcagctgttgttggtgtgcaaacaaggtaggttctacagacttgcattgcgttcgatgatttgctaattactcccgggttttgcagtctatctctgccacaacggctcctcctttgcgacgaaactggccgagctcagcgaccgggcgggtagcgaatgcaacccgattttcgcattcttcgaggttgacttcagcggcgaagagtcgaacttggctcgtcgaaaagccagtcgcgcttcatgggccgacaatgctcctccttcgccgggctccatccaccgcactttcacgttttcaacgcagtccgacgaagcacgggggctgtcccttctgtccggtgtctcaaacgatattcaagcccaagaagggccaaatttggtcatccccattgctattttgcgccttcctactcccgatgcccctaaccatgcgtctgtcggccctaccagtcaaccggattctcaaggacctcttacggtggagcacaagcaaattgcccgctgtcttgatgccggtgctatggatgtcttgaccaccccgctagatcggtcgcggatccaagggcttgtggttcatgcctaccgcacccgtaaagcggctcagagagagatgtcccggttcctcgcacggagaaagcaacgaaagctttcttgggtcggcgtgcatgatgagcagccatattcttatctacgagaagccatggtttcaaagctcatgaaagggatttgcaacccagaagaagtcatacatgatgaattccaagagctggatctcaacgttgatcccgcgcgtatcccttttgtcagaaaagaggtaggcagttggaatttctgcgctcacgagttcactgaggacgaactggtctttggcgcttgtgagatgatacaacatgctttcactatgccaggactggacccctggcgattgacccccgatgaactgcaaactttccttctcagctgccgcgccgcctataactccttcgtgctttaccacaatttccgccatgcgattgatgtactgcaatccgtcttttgcttcctgctccgcattggtgcattgcctccatatcaatcaattggtcaatctcctgtccccgaaactcccatcacctcccttctcacgccattcgacgcccttaccctccttatctcggccattggtcatgacgttggccacccaggcgtcaacaattttttcctcgtcaaactcaacgcacctcttgctcaactctacaatgacaattccgtcttggaagcgttccattgcgccgccttttcccagattttgcgtcggcactggcctgccgcattcaaggacaatcagctgcgaaagctccttatcagttctatcctggccacagatatgggtgtgcaccagaagttcatgcagcgaatgggctcattccaagaaaagttctacgaaaacaaccaatctgttgatggctggaagcctcaagatgtcgacatgtacaagactctcatttgtggattactgatcaaatgtgccgacatcagtaacgtggctcgaccgtggaaagttgcaatgaagtggacgcaaatcctgcaagaggaatttgccaaccagggcgagatggaaagggaggttggaatggaaaccgcactgtttggcgggccgcccgaattagggaacatctacaaactggctactggtcaaattggattcatgtcgatattcgccctgccactctttgaaggcatttccgaccttctgccccagttgcagttcgctacggaccatatccttcgcaatcaggcacggtggcaagaacttgctaacgaagagctgaagaagcaaggtcttccaattgagaaacgggccgaggtcactgtttcgcctcgctcccgtagccctgcagcttctgacaagcagctcttcaatccaggagatggcgcagcggatagagtcaaatatccagatgatggatacaacgaaaacaccattgaaccagttgtgtcgccagatacttcaggtcctcagatcgagattacaggaagtcccctggcgccggtggctgaattttcatcacggaaatcttctaatgccatcccggacctttcttgtttctccatcccaggagccccggagtctgcccatgggtccatctcgacacagcttcatagccctctcacagaagcaagccccgttaccgacgatcctgctattttagccgccgtcttgtatgccaactcggctctcggtaatgggaattcgccagtggggcgtggccatactttcggggctgccgagagaccaagcagctcccgccaaggtctttcacatggttctcaacgcgactccgaacgccaccatgcgcagcacagctcctctgcccgcacgggctctaatcgcaatagttgtacacggacgcaaagcacttacagcaacaccatgacacctatatctcccgcaactaatgcctcgagctttttagccgtggatagcggcgacgaaaagcgaggctccggggaaagtgccgcgccaagtgatattggaggacctgaggacaatagcacacgtcccagcacagcggacgtgtatccttcaggtttaacagcaggcggtttcagccccggtcgcgactctatcgctcgtagtcaagctcgatccgaagatggcaccagcaaagacttctccaggctgggagcccctgggacccgcagcacgactcattcaacgactactggcgaaagcatcaaaaatgaagctcctccagcggatgactctcatggtcatcatagacttcctaagcggaggagtcggcttcgacttgctttttggaagcgtcgtaaccattcgcacgaggtccccggtgagacatgaatcttgctgtcctggttggtgcttttaggcttgaacaacctctagctgtgtataatgctgccatggtcttatgaacatttcattctccaatgaggcttgagaccacactggtgttccatgaattcacgactcgaccagtcgaagaacccgatcaatgggttttcttttcccgccgcattggctctcctggtcacgactctacgaagtcgatcacgataccttcttaccttctgctggacgtccgaggttgtctcggacacgaaagcaaatgcaaagcttgtctgagcaattacagcatcaagacaagataagttgcatgttttactctactctcctccctcggggctgagagtcacgcttttatcatatagtcctctcaatggatactgggattggtgtcccgctacatctagcatctgattatttgcatcgggctcgcccacctacttctgtgtgatgaccacgaatgtctgttttctttcatccttaccttacaccttccttcatccctctttctttttcccttctactccaccattgtgtgatatttcggggcggttatttcttatcctagagttcggtgataggccggcgtttgatctcctactggggtttctttgactcgatattcgggatccttcgcgatcttggatagtctttttctctttctcccctgtgcttgatcctcttgtgtttcgttcttttctctcttctttttttttttttttacattgactcttgttagactcttccgctctgcgcgataatgaatgtgatgtgtatagtggcttgtaatgattgtaagatatgtagttatgttccaagtagtatatatgatccagcatttatgccaacatgatctaaaaatgaactccatgaagatagcaagtcaaaacaatacccaataccccctactgacaatcctcacaatccgccttacccttactcttttcctcctctttcacttccttctgctcaccctgctgcttctttaacgcccgatccgtgtgtcccaagtctctatcaggagcaataacatttcgcacaagtgacttgagcgctttgacttctgaggggaggaaggaatggtcaggacaaggctcccatgcagtaaataagaatgcatagaagaatatgcagtaataaatgacaaaaccaaaggaagaaaacataccaggaaaacccccatcccgcttccgatcccacaaaatgctctcctgcgtcgtgatctccccatcattcatggtaccatgccatatcgtcacagtgaacacgccgccggttttcggaacgagggcgacttcgccgaggtctgtgctgaatgttgagagaagttcttgggcgaactgttggtttcttatgttagtattggttccggtttagtgaggtctgtatattatgtccacggtcacggtcatggttatgttggcagtgacagtgacggtgatatcgagtctgatatatatggtatgcaatagcaaagtaacgaatcacacttcaccccgccgcagaaacgatacaaccaaatatctctaacatgataggtcaaataggaaagataacaacgtacgtatgcggcgcggagcatccaccggcactgtgtgcagaactggattgagatgcgggggagatggacgttggcgggtgcaattgtgtcgctcttattgggggttgagtctaacggggtcaatgcagattcggccatcatggactgttggtttgatgttggagaatgtattgggggcgtttgggtgattgtggtatggtcaagtcgatgtctcgggatggatggggatttggatgatgtcagcggggatgggctgacttgtgaatatcaaattacgaaggtgtatagtggccaacagtcggatgcctgattttaatggttttatcgcctaattgggactagctcttaccagttttagaccgcctttgacaccgctcaataccatcttttgtaagtacacatcgaagagacgaaactgttaccatggggtaattcaaatgccttctacctattttaattctcaaaactacattcaaatattcgccacgccggagccagaggatacggagagtttgaagtttatacggtcggtaggaatggggactttgtgttgaaatccaggcttggctttccaaccgttttgggccttggtgtcagttgcgctattagcttttctccgggaaagtgcgggactacggcgggtatgaatggctttaaatacaggagattcatatagttggagggccttaacgcctaggatcgatgagaaatagtattttggggggggggggggggggtatgcaaactttctttttccaatttttaaccnnnnnnnnnnnnnnnnnagatgggggggggggggggggggggggggggggggggtatgaatagcttcatgtttcaactttcaagctgttctcaatttggtactaggagatctgtcatagtaattcaggtattttaatttcctgccggtctaaaattggtaagagctagtcctaattaggctataaaaccattaaaatcaggcatccggctgttggccgctatacaccttcgtaatcaaatcctgtcttacaattgcatgttacatgtactagattggaataatgcctgattcatacgttgtataccaaattactttgcatgacttctcaattgccaatttaagctagacaaggccgaaacaaccgaggggctgaaccccgacgggtcatcccagccgcgattgccggaatttggaaccgaattggatgaaaatagcgcaatttcgattagatcggtatggtattggtcatgcgaatctatgatacatgaatggcaactctcacgccctgaatggaacatagaggctttttgaagatttgaagagaaaccgtaagaaaaggttacataggagaaaatgaaaaggaaaaaaggaaaagaaaagaaaaagagaagataatgccgattccaaacaaaaaagcaagaaggggtaatggtgaaattcaaagaagaaaaaaggcgcaacaaatgcatcgtcaagtgcactgtctgcagagtctgagaacaaaggggaccggaggcgaaaagggcgacaaaacacaacaggacttgatccccggaggcgtggaaggtttcgtgcaggaccagcagacgattctttcaggccgacatctttgtccgcgcgagcaatcgcaatgctttgttcgggtccaaggggtggtcgtgaatgggaccgggattaagtagaagagaagaaaaaaggagagcgaaatcgaaatcgaaatatcatggcgaaaaactcccgtcgtgagtgcattacatgacggtgcagcaacccccctgttgctgaggagcgtagggatcctcgcgcttgtcaacctaggaaatgaagtggttagtctggatgggcgcgcgcgatgtggaaaaaggccggtcgcatacctgtccccatacggatggaaccataaagtcgcgagtgttgttgcagtagctgatgagactgttgaggtgttagttgtttgctttctgaacatagaaaggatcaaacggacgaaagagctgcctcggagaccttgacccgtggacggtccagatcctcctttagacgaccattgagctcggtcaaccgacgatatttcaagtcggcaacactctgcttcttgttcttgacatcacccccggatcgaagttcgtagggagccatcgtgacgtgttgagctgtggaagaagcgcgaatgggagaaaggggggagagggggtttttggatcggcaggtgttccaagggcgtaagaattaggttaggggggggggccgggtaatcagggggccaagacgccggacaaagaggaaggggaggaacaaaagaaggtgaaggagtcgggttagagtaagagagagagaatggacaaatgaatgtgttcagaggggattttcctgaggagatgggcaggtccgtgggtttcccttttttccttacacgggggatattattgggaggggaggtacccggtacttggcatgagtcggacgactactaatgtttgataggtggatacagtacataacttgtaccgggtacttcctgtctgaactctggattgtgtatatttgtcgggctcggaatgagatagttggaattgtaatctttagttacatgacttggaatattgcagtcaaccaataagaaaacatagtcacaatatgcacggtagtcaaatatgacaggtgtctgactatgtaccgacccaaattcgatatctgcctcaggccacaacacgtgatcgtcatcgcttaacgcgaagtgggaacattggcgggatccaatttttgctctggcctcaacacgcacattgtgaatcttcccctcgttatcgggtattcgcgtggcagtctaatcgcattattccctgcccgtgtgtgtcgctggcctcacccaactttttttgtccattttttaatttcttatcagtcacctttgatcctttcccaaggggcatccacccatcatgccgcctcctccgcatattaagcctgagaatgtcctcaaggtaagcgtcgccgtcgctggcgtcatggttcataagatgcatcggttgctaatgactatatcgtgcacagagggctcaggaactcatcgccgtcggccaggctcccgccgccttgactgtcctccacgaacatgtcacctccaagcgcacccgtagcagccccatcgcctccctcgagccggtgatgctcctgttcgttgagctgtctgtcgacctccgcaagggcaaggccgccaaggatggtctttaccaatacaagaacatcgctcagaataccaatgtcggcactatcgaggttcgtgttgatgatcgctctaaaaaaaaaaaaaagatgaaaaaaagtgtcttgtcactaacttaggatttcttccatgtgcaggttgttctcaagaagttcatcgaactcgccgaacagaaggtcaccgaggcacaggccaaggccgacgagatccaatcgaccctcgagtccgccgctccttcctccaacgttgaggatttggaggccatcgagacccccgagactatcctccttgcaactgtctccggtgagcagtctcgcgaccgtaccgaccgcgccgtcgtcaccccttggctcaagttcctgtgggagacctaccgcaccgtcctcgagatcctgaagaacaatgcccgtctcgagataatgtaccaatcgactgccctgcaggccttcaagttctgccagaagtacgcccgtaagaccgagttccgccgcctgtgtgagctcctgcgcaaccatgtgcagaatgccgccaagtactcttcgcagatgcacgccatcaacctgagcgacgccgacactctccagcgtcaccttgacacccgcttccagcagttgaacgtcgccgttgagttggagctgtggcaggaggctttccgcagcattgaggatatccacactctgttgaacctcagcaagcgccccgccaagaacattatgatggccaactactacgagaagcttgctcgcattttccttgttagcgagaactacctcttccacgccgccgcttacaaccgctactacaacctcctccgtctttcttcagtggccctggccagcggccagagttccaagaaggaaaacccgtcggtgaccgagctcgagatgaccaaggccgcgtcatttgtcctcctttccgccctgtccatccccgttatcagcacttcccgctcccgcggcgccctggtcgatgtggatgaggctcgcaagaacaagaacacccgtctcactaaccttctcggcatggccacctcgcccactcgtactgtgctcttccgcgatgctctgaacaagggtctgctccgccgtgtgcgccctgagatccgcgagttgtacaacatcctggaggtcgacttccaccctctgtctatctgcaagaagattacccccatcctgaagcagatcggtgccgaccccgagatggagaagtacgttgtgcctttgcagcaggtcattctcacccgtctgttccagcagctgtcccaggtttacgagtccgttgagctcaagttcgtctacgagcttgcccagttccctgctcccttccagatcacccccgccatgattgagaagttcatcatgaacggttgcaagaagggtgacctcgctattcgagttgaccacatctccggcgtcctgactttcgactccgatgtcttctcttcctccaaggctacccacgccggcagcagcgctggctctgctgagagtgagtttggctctgttcaacgtctacagcacacccccgccgagattgctcgtttccaggttgcccgtctcgccaagaccctccacatcacctgtatgtacgtcgatccctcctacaaccaggctcgtctccaagccaagcagactgctcaggcccgcgccattgctggtgtcacccaggagcacgaggagacccttgcccgtcgtgtccttatagacaagaagaaggaagccgctaccgatgctctgcagcggaagcagcgcgaggaggagactcgcaagcgtgtccgtgcccagcaactccaggatgctgagaagcagcgtctggccgatgagcagcgtgatcgtgagctcaagcgtatgaaggatgagcaggatcgcattcgccaggaggagctcaagaagcagctcgaggagctcaagactggtgttaagggtattgacgtcagcgagatcgaccttgacgagcttgatgccaaccgcctgcgtgccatgaagctggctcagcttgagaaagagaagaacgagctgaacgaccgtatccgtaccactgctaagcgtatcgaccacttggagcgtgccttccgtcgcgaggaactcaagtatatttccgccgattacgatgcccagaagaaactcgaccgagagatttacgagaagcaggtcgctgatgaactgcgtgagtctaaggagaagcataccgaggccgttctcctcaagcaccgtctgggtcgtctggttccccagttcagcaacttccgccgagaggtttccgagaagcgccacgaggagttcgaaaagcgtcgcaaggccgccgagcgtgagttcgaggccaagaagaagcagcgcgtcaaggaggttcaggaacgccgccgccgcgagaagcaggagcgcgaggaagaggaggctcgtcaacgagaggagcaggagcgtgccgagcgtgaggagcaggagcgcatcgctcgcgaggaagagcgccgtcgtgtcatggctgaggagaaggccaagcgtgaggaagagcgagcgtcagtattcccctattttgatttcacttcaaaccttagtactaacttgacatatagtaaaatggatgaggtggctatgaagcagcaacagcgggaggccgaagccgaagcccgccgcgcagcccgcaagggtggattcgaagagccactcgaacgaactgcaccccgtctcaatgtcgccccacgcactggagtcccgtccacctggagagaacgtcaagccgccaaggaagccggtggtgtcccatccgagcccgctcgtgagcccgtccgtgtccccgtccgcgcccccgtccgcgaagagcccgcccctctccgcaagggtggatatgttccccctcacctgcgcaccggtgccgtccccagcgctggatctgcaccccctccacctgctccccgcgagcctcgtgaatcccgcgacactctgccccgtgaggcccccaccgagcgttgggcgccccgtcaaccccgcgaatcttcttctcagtctcctgctcccgcttcggaatccaagcccgccgctggtggcaaatgggtcccaagatggaagcagcagcagtaaacgaccgagctacgactttccagttaaaaagtgtatccaagctcttctctttttggcgcaattctcatgacccttctgcatatttcgtgtatcattcacccatgttcaccccgtaacttgttaatgggggccccagttctgtctttcagctcgctcggaatatgatataatcttttcctagttttcgctataatttggtggtcttgtagatgttttggacagctctctttcttcctatctacggacaatggtggtttgagccgatgctaaccctcgacgacatcattggccccgcacaggtacaggtcgcatacaggcatgcatctagaagcgggtatattttttaatgaattatgaggtcgagtatagaatagaaagcatgagtccatgaagcgaattggaatggatggtatcacgatttcaagtagaaactgggaagctcgctcaacatgaacaactttatgaatgatgatatagtaaacatcaatatggatatctgacaagagaataagaaaataaaagacaacagtctaaattccgagtcctgacccgaggaaacagaaacagaaacgcaaaaagtgatcaagtcatgaacatcaacatcgaacttatgcagcagccacttcggcattagccccaaatagcttctcccgccattccccacagacagcttcaaagccactgactacatcaccgcagaccttaccagcctctcggtccttgagccggcggtcccactcgccgcgctcgatccaccgcgaaccctcttcgcggctctcttcttcccgccggatgtcagcgacgagttctcgcgcagagcgtaatcggcgggaagccgttgcagtcaattgtctcgattcgtagagggtatcgctcaagccgcgaagtgtatgtgtgatatctgctgtttgcgagatgagggcttggagagaggctagggggttgtgtgcggaggactgaggggttgttgattgggagtcttggtgttgttcagggaagggatatggaagatttggcaataagccctcgtcgataaggggcatgagagagtcgatggcgtcttcggaaaggagggggaatggagagaagaggagtgggtggacgagggattggagggcgcgcgtttggtgggtgagatgtgatgtgattgaggaatgagcggtgataagtctgcgactgaagattagctatcgagatcggtggaattgcgtcgtacttcatgaacttacctcatggcactgttctcaatgccactctgcccaccaagatctttcaaggactcgaccgtgcgctgaatgacatggtcattttcacttccattattctctataccccgccgaacgagactctcaatctcagccatttggctctccaaggcgggggatatatccgccgcctccagatccgagtcaggcccataatccgagccatcatattgcgactcctgccggcggtgctgccgcaaatgattggcacggtatttgttctttgatggatggagtgaatctctttctggtgagatagatggtgaccgggactgcacgctgtgaactgattgcatatacatatcttctccatcactgtgacccatgtgctgtgaccccgcacggctagcttcctggcctgacgcatatccatatccatcttcctcttctccccatgcatcagctagctcatcggccaggtttcctagtcctccgccgcctgcatcagcggcgccagagaaatccccggaccctctatgggacccactcatggcgttggagttatggcgggacgcggcaggagatggaggtgcagataatcggggtgtccgcagtgatctggggctttcaattgcaaaagtattcccagtcccgggggagataggtgagtcgtctgtggccgccgatgggtagcggtgtgggagtttcaggggagacggaggggggggcattggttcgttggaggtatcacacgggatctcctggtggaagctttactgaaaagctggagaattgggttggggcaatatagccagagaaaaggaacaagcggttgtagtctagttgcaggcgagcaacagttgttgattaggacgctgaattgaatggtccgatatctccgatccgggtcaatatatagcgcagtagcaatggaacaaagaccaagctacggtcaattgatataaagaacgcgttaaaagagcgacttctcaattaaggagtgactgcatcaccaggatgtaggaggggtataacacaacaattcatcttcaacctcaccgccgactactactcgtcaccgcccggcaaaaaagaacaagagcatcaaaccccacattatcacactcatatttcccgatatcaagatacccacatgagtattttcacatttataataccaagatgagttctattgaacgcatgtccccgttggacctgctagaccttaaccttacaaatctcgacccgctcactgagaattatgacctcggcttctacctgaactacctgaacaaatggccctcattgttcagcaccgtgaaggaccatgatgccggcattgtaggttacagtatgttgaattctccccctagcttggcacatcctccttaggctccctggatatgactgacatgttccttcgtagttatggggaagctcgaagagcagcacccagcaatgcgtcactccgagcactacacaccatggcatggacacatcacagtcctgaccgttgccccagcctggcgccgtctcggatttgcacgcaggttgaccgaacagcttgagcgaggatccgacagcaacgacgcctggtttgtggatctctacgtccgtgccggaaataaagttgcatatgacatgtacaagggaatggggtaagtgtggcgatatagatacgtccatgctgaattgatggctgacgtatagttacaggtactctgtcttccggcgggtggtcaattattatagcgatgatccatcggggatgtcggatactggggaagatgcgttcgatatgcgcaagccatgcagtcgagataagaagcttgagcacgtgagagaaaacggtgagaacttccctgttgggccggaggatgtgatgtaaagcatccttctttctgtggttattgaagcagccatggctgtcattatttactatctctccccttttcttcgagggattctcatggaatgggggggttacgcagggctggggttttgatggatatttgtacaaaattagacgtatgatagttgccattttcgtctaagtataacatgaagtgcgctgtgtctcccactggctgggaggtaatgcaatatgcaaaattcaaaacgatgaccgaatgatgaagctaatggtataatcgttgttcaacatgtgtatgcgaagaaatagccggaacaaggccgaatcttccggggtggtgggcggcagccaatattcaaaccttggcatggaactcaagacccgagcgcagaaatctaacacaggtcataagaaccgtagaggtagcgagacagcacgcggtgaaaagctgaactccgagaaattggtttgtatcggccaggattgcaccaccgatgggggtaccgatcaacagacctatggaagtgatagcaaagaccatacccaaccgagtgcccagattgcgcacgtccggagtcatgcttgccatgaccacaggtggcagagacacaaacccacccgagaagaagccgtagacgacggcaagaatgatgatgccaggtacggtgtgaacacggatccagacaaaggctaggatggaagtgatggtcacggcgggcgtgagcatattcaaagggccaacgtggtcggcaaggaagttaggcgcaatacggccgaaggtggaggcggcgtttagcatggagagtaggtagaatcctaggttcgaatctacaatgcctgtctcaattgcgtaggactgcacatagaaaaggaagttgtagaagcccaagaagcccatgaacatggcaatggcaaagacagtaaaggccggctcctttaaagcagacaactggtagagctttcgcttctcctttggctggaagcgcgagcgcatgatgctaatagaaaaacaaatggtgccaaagcagacgaatccaagagatcgggtagcccaggcaaaaccgaccttcttctgcaactgatcgaacatgattgggtagattacaccaccaatactgctgccactggcagctaagccattggctagtcctctcttacggtggaaatactgcggcaaaatggcaacggagggcacgaaaagacagcctgctgcaagtccgacacaaacaccttgggaaagaatcaggtgccagtatttagtggcaagactggtcatcatcaagccaaagggcagcatgaaagcagcggtgataaggagggatcgaaaatagccggcatcaaacagtggacctgtaatgactccaatcatcatcagaagaaatgactgcagcgatccaatccaggcaatggtcgatgatgaagtaccgacgagcaactctcgctcataataagtttgatatgctccccatgtattgatgattcccctgtttcaacgcattaacaataggatctttatactgaagaacttatatattcttaccatgaattgaaaaaaagaaagaatgagcccaaagcttggagccatgtatgtagccccgtatcgaatgttaactgaggcccaggctcttcctctggagaatgtgatatattggagttgacattttcatcgcaagtagacgaaggatcagcgagtactttttgctctatatctaagttagttgactccatgttgtttcatgtcacaggtgagagcctgtacaatgtagtcttagctgtgcaatggtcaagaaagtgacaatcaatgatataaaaatctttccagttgattataaaccccaaaccaagcggggttggggtatagggcgggcccccccgagatcggccattcggccattcgagagatataagaaagataaccgggctttcactcgaatatgatatatagctggacctggatatgttatagctacttgagatttgttgaaataacatagtatatcctttgtcaaccaagtaaacacccttactgacagcaaatcggtcgaaaccaacctagtcaccagcgaggtcaatgcactaactcagatgtaacattgaatagccgaacttgtttttcgtcgagaggacggtcttaacacaggcagacgtgcctggaatacagatggatatggaaatgactctaaatatcttatcaagtgcatccagatgttgatatcaaaattgtaactggaagtatacagacacaaaagtatatcactgaaatcctgacaatactcacgtggccgctatgattgcttctatctgcaggaagataaacaggtcaaattatttttagatatgtttttttttccgttctagattcatgtacaaagcctcattggtgtccatgtttcatcaaggacatccaagtctcattttttttgacgggttcttcgaatcccagaactccaaacgctatgctgaaaaagaaaagcaaaagatataaaacagcctccgtggagagcagttgatagagaacagttgataccggtttgaccactacagcagctcctcacatgtccaatcctcatacctaaagtcgaacattgttagacctggcccaccaatcatgtctgacaagatattgcttaccatccatcgggcaggtatcggcgaatgatcaggggaatcttcttctggttcaattccttcatggcgatctgaaggggatcggtttcaccttcgaggtcgacaagaacgggggcgttcatactatgccaaatgtcaacaagctcaatttcacgtaacaaatgcgcaatcatttgcagcaaaagcaacgtacctgatttgcagggcacgggtaccaagaacacgcgcgcgctcgtacttggtcaagtacggggtggtggtgcgctggtcattgggtactttcttctcgcgcgactgctccagcacttttcctgcgtatccagcatttggatcgccagagacaacgacattatcgccgttggtggccgggtaatcatctcccccaaccgtgtcttcgccctcgaggccctcttgttcctccggctcctcatcaaacacatcctcgccgggctcgtagtcgaagctgcgcacaccacattgttagaaaacgggtctatacaagtatacgcgaacacgctgtgaagctgccaggaggcacaatggaagcaaagctcctttgcgcctagtccctgggcaatctggtgaagggtagcttacgtctcttcgacgtcgtcgtcgtggccgtagtcagacataatgacagttaaatctgcaaaggagcgaactgtttgtaggccgaagcgagcgatgaaagacccagaggtatgagagacaactcgggggtcgaggtgggatttgatgctaaaaatcttgggagcggaaaaacttcctctgtgttgaccgtcaccgcctttctggcaaaaataaaaaatattagtttggcattgacgtccgaacttcctcatgccttgagatacttttcctttctcaatcgtccttttcagggcgtctcatgatggccatgaaacgcaaggcttcatcggagggaatcacaaccctcaaacgacatcagaaggataatgtccttgacaattccggtaagtttacgtccacaggtaacgtccaataaagtgatccaatttctgaccattctacagatctgatctaccaggagactcactccgatgcagagtattcggctcctagtactccaagtttaatgagcgaagacatggacgaatctccggcgaccccattctcggccacctcctcccgacaggtatacccatccgagctcaaaaccctatcttgtccgttcgagggctgcgataaggctttcaatcgtccagctcgactccaggagcatatccggtcacacaataacgaaagaatcttcaaatgtgaggttgaggactgcgacaagacattcttacgcccttcccatcttcaacagcatgtcaagagtgctcatacagatattcgagactacgtttgcgactatcggggttgtgggaagagctttgtgaacggatcacggcttcgccggcacgttgctacacacgagggacataacaagtaccgctgtacggagtatccaccttgcgacgagacattccggaagcactcgacgctacagaaacatgtcatggttgcccacttgaaccagaagccatttccatgtgatcacgtggacccaaccaccaaggaaaaatgcaacatggcttttgacaaggctggtaatctacggacccaccagaggagagtccattctgagaaacgattcacatgcgcagaatgtgccgaaaagatggaagctcaatcatcaaatatggccgacgacgatacaaaacaggatgtatcattccccacgtatgccagtctacaaaaccatattcagattgttcaccccccctcatgccctgagtgtccattggtctgttcgacagcacgggggcttcggcgccaccttgagatagcccatggcaatgtcactcttgaagaacgaaagatcttccactgcaccgtccctggatgcgggcgtagcttcaccaagcaaggcaacttgaccgtccatattcgcacagtacaccaaggcgaaaagcggtttgtctgcggcgaaacggatctttcaaactccaacaagctggagggatgggacggcgtcggttgcggcaagcgctatggcaacaagctgacactcgaagaccacatccgcacttcacacttgggtctcccgaatgccaggaaacggcgccaagcgaaaaagacgagcaaaaagccggcgcaggattcagtttccactctttctgccctcacgggccaaggctacgccgaggaaacaggtcgacagatcgcttgcttttaccccggctcgtgcccacatcgtttccatcgcaactacgatttgtgggtccacatgaccaccaaacacagctgcaccgaagatgaggtccagaacctcttcatgcagcgcgcgttgcttacagatgaaaccagcgctggagtcaactcgctgggtatatatggtcttggatatgatcaggatggtcggtcctactgccaacaatcatatgcggcaggagatcactcttcggatgttgctttcggctcacagtcgaacgattcctcctatctccctagccagccggggttggattctgattatttgatggcagatgattctccagcaaggacagcacattcattcttcaatacccagtcgtaatcaaatggcactggttgacactgtttgtgcttaccattagatggaacaatgatgaagggcatttgtacgatgttatgattatctagcgttttgatgcatatccatggacttttcttcaaagttcctatttctcaacagcgtgttgatttgatattttgacttgacatattcaattcaccaaggagcggcttcaaaatgaattccaatgttaatactgatcatctatgtagccttttagacaccgtagcatcaggcctagagatcaggggtaccctcgccttgttatgactggcttatccctacgtggatcttaccctcccagaacgacttcgttgccaatggttgaagctattgcgtgagacggtggattttatgtaatgttctagctcggccaacgcactaaagttcttgatcatagtttatgtcattatagtacttcattgaacgagtgaaagcgaaagaacctgggatatcccatcaaacaaccttccaaggttcgtttcattagctcccgccgtggaactcggacccacttttaatccactttgggtatagctctctattaatttgtacaacaaactctgtaccgtacctatgttgtaggtaaatatggatatagtatcatgtatgtactctgaatatctggctcagaaggagataagcttcggattttgaaagcagactcctacactccggcccaaatccgccgtggatgcagtgaaagaataccctaatcgattacggatttcggaggcaaagtccgcttctacactcaaggggctgaatctgggatagttatgagtgtagtgtatttacaatcaacattcgaataaaagaagtataatctatactatatatctatcatgattcggtagtcatcacagtatcaataccaacaaatccttcactcgaagcacttggccggacatcttctcttgcaatggccgagacgaaatcttccaatttggaaaatcaagatggcgtcgagatgagtgcttccatccataatacagagctcaagcgccaatatccttcgggcctggcggtcactcttatcctgacatcagttactctggcctatttcctctttttccttgatcttgctgtcatttccacggccactccagccattacttctcagtttgactcactagtggacgtcggttggtaattacatatccatttacttgtctaggccacaactgctggtcttttgtcgcttttttccgagatgctgatctctctaggtatggcggcgcttaccagcttggaagtgcaacatttcagcccttgagcggcaagatttacagccgattttccatcaaggtatatcttggttcaagcatcgtgactacgaaagtcaactctgacaagatcatcatatagtggacctttcttgtctttttcgtcatcttcgaagtcggatctgctgtatgcggagcagcgcattcttcggccatgttcatcatcggccgtgttatcgcgggtgttgggtctgctggtgtggccaacggtgcagtaacaaccatctccgccgtcctcccaacacaaaaacaggccctttttatgggactcaacatgggtatgggccaggtgggccttgcaacggggcctattattggaggcgcttttaccacgcatatatcctggcggtggtgtatgtaattccacttcttggggtgatttttaaaatgctgaagtttctatattaggtttttacattaacctccccttgggtgttattgtcggcgggttcttctctttaacacagtgcccgagccaaagcctaaggatccgcccctgcagattcttagctctgccatcaaatctctagatctcccaggattcatgcttatttgcccggccgtcgtcatgttcctcttagggcttcagtttggcggtaaagattatgcctgggatagctcggttgtgattggcttgctagtcggcgctggcgctacctttgttgtcttccttatctgggagtggaaccaaggggacaatgctatggtgccacttgctatgaaataccgagttatttggtcggctgcactgacaatgttctttagcttgtctagtgttcttgttgctgatttctacattgcaatctattttcaggcaatccacgatgacacgcctctaatgagcggtgttcacatgctcccaatcaccctcggtatcgtcctattcactatggtttcaggcaccctgagtaagtgattataattataattttgtccactgatcatcgctaatactagaaagtttccgttttgggctactatctcccatttcttcttgcggggggtgtgatatcatctattggttatggactcttgtcgacattaggtgctaccactccggttgcaaaatgggttgggtaccaaattctttacggtgttggaagcggttgcacgactgcggccgtaagtccgattcttccgaggttgacgaattataaccctatgctaatccgtaccttcaatttagccctatatcgctatacaaagcctcgtggctccagagcagattccccttgctatggccattatcatcttctcgcaaaatattggtgccgccatctctctgatcgctgcgaacgctatctttagcaatagccttcgttcggagcttcaaaaacgcgctgcacaaattagcgtttctccagacgccattatcaatactggagtccgctccatccgtggcctggtgtctggttccgagctggccgctgtgctcgcagcctatgccaaaagcatcgacaaagtcatgtatctcggtattgctgtcagcgtcgccgtgttagttttttctctgggacttggatggaaggatatcaggaaggtgaagcttcagctcattactgaaaaatctcctagtgtaggtgataaagatttggcagtgattggagaaaattagggtcgtttgtcagcaaaagaggtatattcatgcttcttcaatatcctttcggcatgtctaccgacgaggtggtccactggttgttccactgttcttttagagagaatttccttttctaggctgaattcttgtccggacagtttagataacatttaatactacttttcagtcacatgcttcactgtcgataagttgttcgatgcaaaagataataacgggatccgcattcacatttaggtatggggaccatcaggctatcttcgtcggtggcgtccctttcgttcttgtgtgcacttgcatgtttatttgaccaacaagacatacctaagtgagaaggtttgatattatagcatgaaaagttactattgtatgtaattttgcatgagtatataattgatcctgtactgctttaactaaactttatcctgcaaactgggtatcctttttcactaagctaaagcattacgacaagtttctttttcgaaacaccctttctctgatggagagcctcttggatattatctagccttttgcccacaagatgcggaggaggaggtggcacaaactggccttggtcaagtgcccgtggtaggaaatccatgtagatatgagagacgacgctatcggggtcaactaggccattgagaagaccgaatttggcattcactccggtcctgatgcgcgtctcgatcgatttgattataccccccatcatgccgatcaagtacgtgcctttgccaacaaatgtcgtgagattctcggaagatatgatggcgcccgccacagtaatgaatttccgagtgagtttaggataatgtgtcttcataaccgcagtgcatgcctcagcagcaccactgccaattgtgtaggcgccaaccagcttgtggccttgcagagcaacgaggaggtccttgaccaaacttttgctcctgtagtcgaagactttagtggcaccgagacctttgaacaggaaatggccaatggtttgaagatgtactactaggtatgccacgacatttactagtttattgtaaatgatttggagcctccagagacgactagtgccactcgggagaacatctcaccttttatatgggtttagtcctcgaccgacaaatcaatgctcggatttttacagagagcctccgatcatcaatacgaaaaaggaaaagtgtcaataaccttgaaataaccttatttccccaacgggcattattaaccgtggaaccccaccgacacgttcaaggttgttgtatagagcggggtccagatgaaaaagaatcgcacctctaaatccctgccacatggcggatctgcattttttaaagtacctatgacgcgttggtcggatctccatgggggccatgctgatcttatgctgcaggtcagcaaatcttggatttgatctatgccaagactgcgaccggctagtataagacattgtaccgagtacgtattatatacaccatttgtattccgtacaaactagttaattaagttccaagtttatccgagcaaagattgtggctggatctaatgcaggaggtcccggagtaaattgaaatgatggttagctacttatgtactgtagttgagcatggacttcaatggtcggtgaaaaggcatagcgtgttcatgcggacccataggaaacgcaaggaaggcaacgtgtgagggtcaatgggcagaatttgccaagccaagctcacttccgtcgagagccagtagcgcggatgccagccttggccacgatgggaagtcttgtagaattaaggggggaaattgggaaaggagatactatttagaaatacgttgtataactcaggggaataataacatagttgccttatactagtcctctgtgctctgtactccgtagttctaacataagacatcctatatttatccacccatgcaaactagtctacttatagtcggcttgtctctccaccgatgatccaaggggataacgccaatgaaaaacctttgttcaaggtctcaatgcaaagagaaagaaaaataaaacaaagcagatattggcttggcttcagcttttcaagtgtcgcacgagacaataagtatatcattggtgtagcgtggaaatgttggaaggtcttctcttcgcctccgggacttgccccaactgatccacagtagttcttggtcttctctctctatcttctcttcaaacctccctattattccatatcccattcctccacctctctcttttgctggaaattttttaaaaaaggacccgttaatcccggtgattagcgacgtattcggcttgtaacgtcatcttccttggcaaagaagctcgacttccctaacctccaacccaaccactcgtttttttttttttcattcttattcttccaggttcacccttgtgtggattctatggattgatctcttcgtcgccgaattcggtctaggcgcagtcgctatttcacagtctctcgttcagcgcaatcgacctgcctcggccagtttccttttaaatcctaccacgccccagtctctctccttacctgcaaggcgtttcacagtctaactcggtgaggggtaatactcaaaagactactgagcttcttgtccgcacttcacgttccgacgtcatgggtcgttcgcgtggtaagtcgatcctctccgggtatgccgggaatggcactagagcccgttattgactctcccttgcgtggaactagtccgctcgttcctattcagttttgggggttcaaagaatcatgcttctgggaaagagagcaaaaaattgtcgagcaacgttacgccggtggccaacgtggccaacgtaacctcgtccgatacaccaccccagtggcaaacccctcccgatacaccatcccctcctcccgaagcatcccctgtgagctcaggaccaagaggcggaaatgcgtcgcgaccggcatctatgatcttctcacggaacccgcctctcatgcatcagacgggcgataccccaccggagctgtcgccaatcttttcgttcctcaatatccacacgaataagctatatcatgaaggatactttttaaaattgaatgatctggattctcgtaagcgatcgctggccttggtgcattgcggggcaagggctaacacgtggcagatggacggccttctggtgatcgacaatgggtggaatgctacgcacagctggtcggaactgttctttcactatgggatggcgctgcgctggacgcagcaggtggagaagaggttccggctacctttatcaatttggccgatgcggctctcaaaatggtaagccttacctgtctgaatcgtcaggcatggactaatcagttactcgcagattgagactcttccgattcaaaatggagctatagaaccgttgaagaacgtactcagcctttcttccgctggcaaaaatcgatacctcttgcatttcaattctttcaactcattgacccaatggactgcggcgattcgtctctccatgttcgagcacacatctttgtacgaagcttataccggttctttgattgcagcgaaaggtagaacactcaacggaatcaactccatcttggcacccaccaaattcaagtacgaagattgggcgcgtgtacgatttggagcaggaaccccgtggagaaggtgctggtttgtgatctgcccgccagatgaaaaagagctccacaaagcgcggaaaatcatgaaaaaatcggcatatgaccgcttgtcaatgccagttaccggcaacatcaagttctacgagacgaagaaaactaaaaaggtgactcccattgcaacggttactcaggtttactcggcatatgcggtttatccacaatctacggctataattgatgcatcgaccctggtgaagttggaaggacggattaccacacattcgcctgattcttcttcggagggacttgtctttatcatgcctgagccacatcctgcggtttctggattcgagatgatgctgcgcttccttttcccgacgttcgacactttcaatctctatggccgtcctactcgcctggtggcagacactaatcacatcaagagcatcatgtttgccttccccaaggagcgacggtacggctatcttgatgtgctggacattgccaaccttcttcaaaccccgggaagccaagaatggagcgaagctcagtggagaaaacagctcaaagaggcaacacagcgtcgaatctcgtctggtaggagcagaaccaatagtgtcaacagcgtgagacctcgttatcgctcgatgtctggccgacacagtgatatccctgtggactccactcggcgccagtatgctgatctcgaccacaagcctgggttcaaccactccaccgaggctatcattcatgaagtccctcaaaacgaggacttgcccgctgtgtatgaccgcccggtttctgataacacaggcttcaacactggctctcggctaggccatgaatctttaatcgagagctcacctcactcatctgctcaagatctgatgcaccgtggtgttccagcgttcgatcctatcgctgagagcaccagttccggaagcgaaccaaatatcaaccacctccgaggcccgccagttgaagaacagctccccccacgaaccccaccggctcctgttgaaaacccacccccattttcccatggacccagagagatgcccactaaccggccagaggcttcttcggagcagaggttggcaaacaaccggatgtctcacgcaacactttcccaactcacatcggtcggaactatgggaatgagcgcggcagccgccactgctgcatggaaaacccaccagccccaggatagggccttcaacggtgtctataagcctggaccgattgtctccgcaaactctgttgcaacttcatcgagtgatgaggatatcagtcttgctcttccggttcgacctccctcagttcctgagcatcgtccgatcacacctagtactggcagcccacatcggccttctccccagcagcactctcctcaacggatgcacattgatgccaacaaatctgtgcgacgcaagccactccctcaacaacagattttcgggacagagccagagtcaccagacgaaccgagttatgatgatcttcgccatacccttgatgaagatgcgctgaataaaattgcgcctcatcttccatccccagcgtcatctgttggaaatagaaacggaaacgaggacgacagcatttacgatgatgcatcgacagtttcgcctgactatgctagcacacacggttctgtctacagcaagaaatccgtcgcatccaccaaacctagaatgggtgtcatgaaaactgtgggagtcccagcagtcaaagattatgtcattggcgatgctcattatactatggataagcccccgacctcgaatccggatattcccagtgttgacttcggcccaactatgacatatatgcctactactgggcgcccaaccacatcagataccctgagaagaacaatgcatcaacgtaatgattcgtcggggaccaaaattgcggttccgactcaagcaatcgatcaggctaatgcgcggccttccagtcgcgaagaatatcgacgcagcatgctgtggcagcctggaatggcttctcgccctgtcactccaggtggaggtctaaccccggagcagtacgtgcagcaacgggcggcacccagtcctccggtgcaggtccacaatcgcaccccttctaatcccatgtcagtacaacgcccggtatctggcgactggacacataatgtccgttccaattcgcccatgagccctcagcgggatcccaattatcgaccttcgtctcgtggtgcccaaggtatcctcaattacaatgatgcttcaaccaatctttccgctcgtgaacaggagcacgttgcccgcatgactggctcttcgttcttcaatatgtcaaatgacaaccgaaaaccacaggcgccagtaagccccatgggccttgtctcgcacatcgatgctcgggagcgcgagaagcgtgaaataagggagggaatgtcgaaccaggcggttcaacaggccattgcccaccgtcagcaacacatgatgcaacagcagcagtacgcgcctcagcagttcgcgccgccgttctcgccgccgttctcaccgccattctcacctcaacagatgcagacccaacaggctggctctgtgtatccatctcaacatggtcgccacgagtccatgtacaacattccggttgccagccacacatgggatgctctaaaccagacaatccgccccgacgaaccccgtcgatcgtcctggtacggacagctggctcctcaaacaccgcctagctatcaacaagaccagtatggtcaagaaccgaggtactacagccatgctcaatagaccggttctttcccttgggtctgacctatcattttgtcactacctcgactttcctttcgattttttcaacaacttattccctgcatattatcagcagcatcaatttctattctgttcaaatcgccattcctgcatacataccaacctttgcacctggcttccaacgcgttcatctttcacgcagtccttctcttttcgccctctaacatcactcattatttttcctttatctctcattgcttctttgcatcacgcatccaatcggagttccagatgggcgtggtgggatcgtccctgatttttcatgcgaatcgcttgcttacttatcattatcggggtccttgcttttactttttattcacatgttttgtgccagcatgtagatcagactcgtggaaatatgtggcctgtatgtacgccgtatagattgatcatggataccatacccaaccaggtactatttgtcctttccatatctgcattctttctattgttctctaaagtaagcattttgtagtagtaagaggtatgtacgcacatcgtaaacgatagttgcattcaaatgacatagaagatgggaaagaaaagaccttactacgctgtgaagcatattttccgaacgcaatcaagcaggatgtcactttacaaccggaatatctagtactccaatcatgtttcttttcaaacctcgctaccaatgtaggacatgctacaatatacagaattttagtgaggcttgtaagctacgacatccttctacatcctattagttcgccatatcaattccacgctccacacacacagttcagttcatacaatgataggtggtacgcccggaaggcgagcgcaaaaccggcctgatcaggggaaccctgttaccaatcaggatcaagtagactgtatctacggagctgtacattgtatgatgacaattattttgatatagaaacatcactgagcgtccttaatcggtttacgctatgctggtctgcgctacaacatagtctggtgtgatgtaaccttgtatatctatagtgccttgaatgatagtcgggtacaacgggtgtagagaatatatttttctattatacacttcttgtcgtgctatcaaccgttcttgccagggataaatgatttatacattcacagtatatatatggataatttcggtgaatccaatgggactacttaacccggagaaaaccttatgacagcacttctccacctaaccctctgtcttatctgtgaattgaacatgaagaaacatatgattgaacatagagactgacatttgacgtaacctccagggctctaatgacgtaatggagaacattggaatactggggaacaggttttccccggtttatagtggatttaatctagagatggttggatttaattggatacctgaccttgcttgtatatagaagtacacaaatcctagtgatagtgtcgaacggtcaggtcgccatcggaggtatatgagagcagtgtccgccacttctttacatactaatagccaccctgatatcatctgttgtgcaatttgcatgcatagaataagccatttgtttattcattctctatgtaccgttgtggacccaatatctatataatagacttaatcgactgcccgaatggaccgttcagtccccgaaaatcccgaagcgtcgagcttcaaggatgaagccagcccacaagcaattaagaccgaagcaggacggggtgccgatacccacgctgaatatgcctccaactccgatacagcaagccaagaagacaaacctaagctgcgtactggtggcaagcccgagctaacagaagatgactgctacgaaaagctcggcttctgcttcccaacatggaagaaatggatgattctctccgttattttcgcggttcaaatgtccatgaacttcaacacaggcgtctactccaacgccgtccccggcctgaccgaagaatttcatatcagcgaacaagccgcgcgagttgggcagtgtgtgtttctagttgcatatgcattcggatgtgagctgtgggcaccatggagtgaggaattcggccgctggcccatcatgcagctctcacttctttttgtgaacatttggcaaatcccatgcgccctcgcaccaaactacggcacaattgtcgtatgccgtgtcctcggcggtctcagttctgccggaggctcagtcaccctcggcatgacggcggatatgtgggaagccgacgatcaaggcttcgcggtagcctttgttgttctctcgtccgtaggcgggtcaaccgtcggacccttcttcggcggtatgatcggccaatggctcacatggcactgggtattctggatccaattgatcgtcggaggtgtaacccagattctgcacttcttcatcgtgccggaaacacgcacgacaattcttatcgaccgtgaagcgaaacggcgtcgtaagaatggagaggatatctggggcccggacgaactgaaaaccccgcgcctggactatcacgacgtactacggatctggatccggccattcgtgatgttcgtccgcgagccaatcgtccttttcctttccctgctgtcgggtttctccgacgccttaatcttcgtcttcaccgagtccttcgcattagtctttgcacaatggtcatttagcgttctagccatcggtctaacctttgcctcaatcctaatcggctacataatagcatacgtaatttatttgcccgacattcaccggcaaatccaaacacggcgccaatacggcacagccagccgtctcgccgagcgccgtctcctccttctcctcttcattgcacccctcgaaccaatcggcctactcggcttcgcctggacatcaaccggcccaccaatcccatggatcgcgccgtgcatcttcgcctgtctgatcgcaatggcaaattatgcaatctacatggcgacgatagactacatggttgcggcgtacgggccgtactctgcgtctgcaacgggaggtaatggctttgcgagagacttcctagctggtatcgcgaccatgtactccacgcccatgtaccagaacattgggaaaaggtatcatctccagtgggcgagtacgctgctaggctgtgtgggcttcttggtcttaattccgatttatgtgttctactggaagggcccggatattagggctaagagtaaattcgcgcagcagcttgctgctgatcgggagaggaatactgagagtaggagggctagtcgggctagggcttcggttggggcataattgtgcttgtggttgctgtatgatattcagcctttgtatagttgtatagttgctagatgcatatattggatagatgtgttatttcgtgagtcctactcttatgttgtagctttgagatgtactatcaaaaactcggttctgcttcttctagaaatatatattggaacagcagatccgcaatggcatcatgaaagagagagcgttcccatcccaggaacgtggggaagtatacatccgaaagaggaaagtggaccacgacacgtgctagtatacaaccaatgcatgctgcccctatgtcgtatgtagttgcgaattgcaaaaaatgtacttctcaatcacattcgttattgatggatgaatagttactcttagcccataatagcgtaatggcaaaacagttataaaggtatctcaagaacgccacaagtgccagcttccctcgcttccacgatgcttcaactccctttccactaggaaaagtgtctagctcatgctaggatatataatcctatgcaaagagatgtttcgtaaatcctatattatctctgactagatattgacatctagctcgaatgcagcttcttgacgcgcatagcaccttcatacagaccgcggtccaaagcggcagcgacagttaaagtaccaccaatgatagcacagacaccagtaaggaagttagtgaaagtcttcgggcgagcctcacggttgacaaccttcataggagagatatcgtaattgaagaagacgcctggaataccgccaccggcgtgcacgcgttccttgtggccctccgcagcatcatttccaccggaaagaggacgcttgtgcgaggttaccgagtactgatgagcctcgatactaccctgagtaccgtatgcgaggccgtgggagccaagaggcgcactgtcgtaggcgttgtgtatggcagtcgagaactgaggatcccagcctagaggtaagtaggacgtcgagacaaccttgacaaagtacatgaagttgtaggcgggttcgtcggtctcctgcttggtatcgtcgagtgggttggtgttgtggtggtctgtccacccccagcggcctgcgagctcggcggggagcttgggcccgaagcgaagctcgtggacgaagtgggacattgtgtgctggtccgccgggcccgcgttgggcgcgatgtaggcgtcgagatcgtggacatgcatgttgccagtggtgaagctgcggcctggtgcaatgtggaagttgcccacaaccttgttgaccttcagcacaccctcaatccgacatccctcacggcgctgctcagcgagtttctcggcatatccttcgcgcttgcattgctcgatgttgctgccatcgccaaaggcccattgcttctcggcgtaggcttcacgcacttcctcacaagtagtacagcatcccggtttgatgacggttgggggaggtgttgctccaccacattcaccgcaatagtctggagccagatgcttcgcggcgtctgatggagagtgtctggggaaggaagataatgagtttgcgatcgcggtgtgaaggatttcggggtggcaggactggcacttacaggtccaaagcctggacatcaatcactttgccgccttcatcgcgtgggcttaggcggactttgctcacgccatgggcaacgccgacctgctgctcaccagagacatccatcacgtccaaagtcaacagctcacatggcaaccgagggaaggtcatgttcaagtgaatctccattcgctctcctgcgcagcaaaattttattgttagcgaccttgccgaccttgccctatgcattgtatcttctgcaggtccatcgtggatccgatcgagcccaaactctattcatacctcgcgatttatcgacgacaagctccggcagcaccacaactctccggtagtcggcccattcaccccataccagccacataacaatcaataacgaagcaattgtaatgacacctccggagttcgtgcgaatacgagcatcttcaacggtcttggcgaaggcatctagcctcgtgaatcgcgactttgcggacatctcgccggtcaattgaagaccataaggtgaagcgcaaaggccaggcaagggtttgtggacagcggctgtatgtcaaatgtctgtaagacagataacgcgaataggtcagctaggtggtcattggacgcgcaagctctattagtgagagagaccaccaaacaaacataacagagtaaaggaaatagggaaggcacccataccaacaatagagtccgatgagtcagttcaaactcaatgcgattgagtattccaagcacctgacaatagagacaagagcaaggctaatttgaagcctcaagtggccaggcatacttgcatggccgatggatgtatgaggagcgtgaggacagacgacagcatgtgattggtcaccccagagcaaggagatgagtcatctcctaattaggcctagtaactgacaatgccgcctcatcacgtgccaatcgtcactttttctttgaactcactttacttattcacggccctattgttctttggtcattcactttcactttcttattgtcttgcagctgcactacataatctgcagtcccccctcttctccagtcttttcagtttgctttttctttacctcccaccttcccgagtcatatctccattgcgatttcctcacatgcgaactacttctttctgcctgatctgaggcgcatagcgcgctgctctcttcaccttgatcgtttcacctttctttcacctttcctccctttgcaacaatctccgataccccaccaacctctcaaatctctcctccaactacgatgaagagcatgaagtcccgccgcggcggcaatgatcgcgggggaatccgcaagcggggccctactcgcaccgaccgggatggcgacatggatatggattcgggcagtgcgcgtgcaaagagaacccgtgctgagaaatctgccttgggtggccgtgccgccggcacaggcgtaggtggccgagctactggaattagcaaccgggcccaggctcgtaccaagcacagggattcggatctttttgagagagcggtttacagcaacaatggccaagcaaacgttataagtggcaacaagaaaacgggcggcgatctggaacagtttagtgtccgaggatggaaatcaagcaaggcggcgagcaaccgtgatggcggccttgagagcctcattgcattccttgaacgtcgcatgaactcattcatcaaatccggacctcgcgccaagattacaaaggtatgttcctcgttcacaatagcggtcaccaacatcgattctcgacgtcccccgcttcagtgtcctcttgttttcgaggacgatcctcctacaaatcgacgatcgacacattttgggctttttggtttctttccctttgggtgaccgtagttttcaaggtccttcgcacctttctaactttcaaattagtcgcgcactgaaggtgacactctcgtggccttcgttcgacctgatctggcgggtcacatgcttcgaatcaacaacaatgttttcgccggagcccatgttactgttgaagaatacaccgctgccaccgcactcgatcaggaactggctgcagccgaccccgttcctggctcgaccgccgataccaagactaagatgacaactatcctcggcaagcgcttcttccctgctaccaagctacttgacttgtcgaagctgttggacgaccctgatctgcaagccatgggaatcttccacaacgtctctaccaagtccaaattcttccctgctctcatgaaggtctgggaactgggcttcaagactgtagctgaacgacgtgaagcggtcgaaagtgtcagtctggcggaaaacaacctcagcaacatcagctctgtgactaccctcgcacagtctttccccgatatccaacacttggacctctcaaagaacaacatcaaaaattcgcaggcgatgatcggatggcggtggaagttccgcaacctagttttcctcgacttgactgaaaacgaaatcagttccgacccgactttcaaggacaccatgctcaagtggtatcccaagctgcaaactttaaataacgtccaagtgcgaactccagaggaagtcgcggctcagaagaagacaccgatccccgtcctgcctcctcacttcattgacgaatctcaagtcggcgagaatttcgttcgtgctttcttccctggatatgataacgatcgtaacagcctcgtcagcagtgtctacgatgatcagtccactttctcgttgaatgtaaacaccacggctccccgggccactcaaaccgagacggcaggttggggtgaatacatcagaaagagccgaaatcttgacaagatcagccatctttctgcacggatgtcacgatccttcaagggcattgagaaaatccgtgaagttttcaatgagctcccgcccactcgccaccctgatcttatcgcaaaggcagagcaatggctcattgaatgccacccagtccctcatctccccgaccctactggacagagccccactggcgttggtggcctttccctcatggtgcatggacaacttgaggagagcattggtggcaagattgagatccgaagcttcgaccgaacctttattcttggccccggtaacactcccggtggcatccgagttgtcagcgagattttctgcctacgcgcttacggtggacacgaggcgtggtcgcctgagatccaggcactttcccaaattcctcagattgcagctcccgttcctattcccactgcggctcctacaccccttgcagtccccgcagctgtcccaggtggcaatgttcctgagggatacggtttgccccgacctggaaaatccgacacccagctccagcaggagcagatgatcactcagatgagtggcaagtcgggcatgactttcgaatactcagagatggccctcgcgggtaatggctggaatgtcgagcttgcttggaagaacttcgaacagctcaaggtaagctaattccgaggatggctccctgatttaccaaggaatgataactaacgaagctctacaacaggcaaccaacgcacttcctcccaccgcttttattgctccggcgtgagctttcactgtcatctggtttcattgaaatcttccacgtccactcccacttccattgttgttagctagtcagttttatctcgggagtggttctgtggaagctaatgtatctgatgtgaccatacttttttttacttgcatggcttgggcgaatggcactggtttgatagtctccaaatctggacatgggccactaggccagggacttttatgaaaacccaaaaaaaaccaatcaaatgaatccccttctaatatctcactcaggatataagtaacaaactgtagacctcagaatcacaagggttgtctctaaatacccaacaaaccagccctgtaaggattgcggtagttgcggaagatgccaagctggcgcgctagagccatgcgggccgcgatcaacatcccccattcaacttctccctcccacgaattccgcattggcctcacaaaaagcaagttgagaccaagggcaggatgattctggtaggctgatggaatgacgatcactgccacaaccaccggccacatgtcgccaaacgaggaaccaagcctcgacgccttggatgcgggtgcggaacaattgacatttcgttctcactgttgtgtatgctgacataggagtacatccagtggactacgatccgattgaacacttgaatgccgttttctcccatccatccaccctctcctccgtttctcagattgccgacgccctgaacaaatgcgaagatgagctggacgatgacatcggcatgctggtggaggagcaggtcacctccaatgccggtagcgtggaacgaatccaggcagctaaagacgacctgtcggagctgttcaagaagatcgatgacgtgcgtgagcgcgcattgaagaccgagcaggcaatcaccgaaatgacagccgacatcaagcaattagacaacgcaaagaagaaccttacactatcgatgacggcgcttaagcgcctgcaaatgctgactacggcgtatgaccagctccaagctctcagtcggacgcgacagtatggagaatgtgcacagctactccaagctgtcattcagctcatggcccatttcaagtcgtaccgatcgattgaccaaatcgcaatgctcagtcggaatgtcgcggatatacaacgagacctccaagagcaggtctgtgaggacttcgagctggccttcgccaagggggaggtaggctcgaagcgtgcgatgctcgcggagtcgtgtctagtcgcagatgctctgggtgagcacgcacggtcccgactggtgacttggtattgcaatacacagctccgcgaataccggcaggtcttccggaacaatgaggaggctggatcattggataacatctcccgccgatattcatggttccggcgcatattgaaaatatatgacgaagagaatgcggctatcttcccggcttcgtggagggtaaatgaggtattagccaatgtcttctgcgagggtacacgggatgatttcaagggtatcttatcccgatctgtacgcagcgggcagacgatcgatgtgaatttgctcctctcgtgcttgcaagagacactcgatttcgagcattctcttgagcgccgcttcgccccttcgtcgcgtgtatctgttgatacatttgcctctgccgaactgcctgtattcaaagagtcaatttccgaagccttcgagccatacctcagtgtctgggtcgaggctcaagacaaacaactcgcagccctgctaccgaaataccgccagcaacctctcaaagtaccggacgaggagttcaactcgcatattgtgatttcatcttcgactgagcttttcactttctatcggcacgctttgcaacaatgtgctaagctttcaaccggtggcagtctagcagagctggccaaggtgttcgccaaatatctagaccgatacgcccaggaggtccttctcaattatataagtgaacgaccaacacttcacacgccgtctagggtgccatcggtagaggattacgtctcagtcttgaacactgctgattactgctatacgacttgctcccaactggaagagaagattaggggtagattggatgagaacctgaagcaatccgtggatctgcaaagccaggcggactctttcatgggcattgcgtctgctgcagtacgaggccttgtgcgacaagtcgaagttgatctcgagccctcctggcgcgaaatgcgcaatacaccttggtctaaaattgaggcagtcagtgatcagagctcatatatgggcgagatgctctcccggacgaaggagaaggcaactgggattttacagttgttgcataagcagcaatatgcgcgtgccttctctgatcatctggtggagctcatgtcgagccagttcattagcaatgtcttccaatgcagaccgctttcagaaactggcgcagaacaggtatgatgtcccttcggcgatgtaattgtatatcttactaactccattcatagatgcttctcgattcgtatactctcaaaagcggcctttcatccctgctacctgctccagcgcccgccggctttgtcaagcgtgtgaacagcagcttcttcaaaatcgaaactctcctcaaaaccctccaggtccggccgtcaccaccggaagctcttgtgcaagcatacctcatccacattgctgaccgcaacaacaccaacttccgcaaaatacttgatctcaaaggcatccgcagccgccaagatcaaaatcaccttgtggagctttttaatcttcaccgtgcatcagatcgctatgcatccagccttcaacagagcaacccaatactcgccgctctccaaggaccatctactaccaccaccggttccgtatctcaaggcctaggtctaggcagtgccgccgcggccatgccctctcgttttgacgcctccatgctcggctctgccatcatgtccgctgccaaagacggtgtcgaccgcttcggaaaccccaatctgagtatgggtcctggtgcggctggggctactgggacagctacatctacatctggcgtaaccagcccatcaggcaccttatccccttccctggccagctccagcctacaatcgaatcccatgcacacgccaacagaaagcaccaccggaaatctcaacgagaacctcaagaacattggtaaattcttccgccgcgatctcggcggggttttgggggcgggtgggggggnnnnnnnnnnnnnnnnnnnnnnnnnnnnnnnnnnnnnnnnnnnnnnnnnnnnnnnnnnnnnnnnnnnnnnnnnnnnnnnnnnnnnnnnnnnnnnnnnnnnnnnnnnnnnnnnnnnnnnnnnnnnnnnnnnnnnnnnnnnnnnnnnnnnnnnnnnnnnnnnnnnnnnnnnnnnnnnnnnnncgccacggcgtcgggggttttggcggccggttcgggcggagcaatgaggatggggtgtagcttctccccatctattttcattacgtcttctatttttttctggttctgttttgactcgggcgtggatacaccattgtaaaaatgttctttgccgtttcggtcgatttgtccgagccattgaatgcccgaaggagtagcttgtttatgtatcagagcgccctgtgttgaccttatgttttgcagttgtataccacttggattgaatgcattaaatgcgacatctgtgttatttggatctaatttgtctatattcttctagtacacatatcccctggtgtgggacagtttggttcgaaaatatttattctcttttagtccacgtccttctaatgacatggctctacaaaatataatatctatatctcttctccatagtcacccacaacccctcccttttcctattccaagaaaaccccaactcggcaaaacatgaattccgcaacctcccaaccccggggacataccctccgcacccaccgacatgtaaccctatacgaagaagaacagggctgggcacaaatggaagcactagtatttaaagtggtgcagaattcctcgacaactacgacgcatccacagaccgatgctagatcttcgagcgcaacggcgtttctcggccgtatagtaatatgcaagtcagaaacagactacaagaaatgagatatagatgaaagtcaacaggtgagtttcagctggcctctcacccatttagagttaaatcctctaaaatcttgggtcaaagtcctcaattatagtaggaccctggacggtatgtcttaaacacatgtgaaaaccctgcgccaacctgagcttctgcgtcctcaataaacgcaggagtaagcgtgatacatccagtacatcttacaaaaataatcagacctcaaggatgattcctctttgcgtgtacctgcggtctgctcctccgcctcttcgcgcattcgtaagagatctgcccggtttttgctcataccactcgatatcctctggataattcgttacgcgccctaggaatcgctcaagaacacaagcaacatatgcattctcaaaaacccttcctctttgaggactagcgagtggggtccaataactttagaaatatccacggattcgttccagagcgtttgcgttgtagatcgtgcgggtctataccccgtccgtacctttttatgctttatagccggtggcgtaccggcagagggagtctagaagtagtgggtcgaggatacatagcatcaatttgttactacgtgggctaggcgggcgcgtacatctgcaacccctctctagcgcggttataacagtagggttaacattcgatctataagcgacagagatggcaggtaggaaagaatagcgaaaatgcgataatcaaaacaaattctctgcgtaacgtcccaagattcaaccactggcgaatgaggcgtttgcgccgctggtcgaatagtttgttatgcgagtctagataagcagtatcccattattcctagaaatgggaatcgagttgatagcgcatgaaacattaggagaggagtcacatatactgtatagatgtcgagtggaagagccccctatgcgggaacccgacgttagatataagggggcattgtggcgcatatctacgtcacagaaacggagagagactgactgaagcattggagttatcaagtcctttggcgatgactctggtgggaacaaatgatggccttttccggactgaacctaggtcccagggctggtcaataggttaaagaagggtgtaaattgtaggatagctgtggattctcgaaagacttcttctgtgctgactgtttcaggctgcctcttcgtctccattcagggccttggtgtgtaagagtctttggtacctttcatattttcttaactacatgtgctttcccaccttctaccgaataggacaacaagctataggaatagatatgttcccctcccatcatgatacttctatatgtagtccccggggaggcgcccgaaacagatcgtccaacggggatacctagaggctagaaccctgacaggtttcgccgaagatccggcaggtgggccgggacctggcggacaatgcttgtgacaacaccgtaatgcttgctttattcattttggttcagactggtgaaatagatgttcatacttttctttactcattattcagccttgaaagtattgtattagacgatcaattagaaccaaggctacagggctgtagatataaagaccaaagtatggaacaacattccatggtctcaaccagaggtctccctacgcgtgggtctcttctccaacgacacattattctacttctagcgattttgtgcagagaaggccaccgcgaggagaagattttcctattcgggtcgttttcgttttcgcgagtatcaactgaacccttgatctccacttccttctgctggacaattttattatgtggggccgatttcatctaaatgatcagcatccgaagcaataaccgctttggtgcagattctggagagtctgaaacaccatacaatcaagggaccaatgtacaatgttgtaagcaattgaataggggcgcgtagctcatacattgccttctatataagatgggtagggagctgtcttattctctgtttccagcaataccagcactccatcttcttcacccttccacttctctttttttgccatgtttcccatcgccgttttagcactggttgctaccgcccaggcacacacagtcgcctggaccaaaggcatgtactgctctgggggccctgatctttctaccgtcaacctcaataccaacacagcagtggggcccctttataacctcgccaaggaggactggtggttccaacacgaacgtggatgcgatgcagcaccgccgcaggacggcgaggttctcgaactccctgctggtggaagcttcaccgtcgagctcgcccataaccgggcgcagactacactgtcatacggtggacagtacgcctctgattggccggatggaaaggatcacccagaagactgggcaggtcctggaagtccgccagactgcatccaggatgacggtgcaatgcacaccaacaaccaatccatggctgctggtaccgcgtttgcgatcagctatcagtcagatctagccgatgtcacaatcgacaacttggccgtattcacggtcttggagcagtaagtatctttcaagagatgggtgcgtgaaatgattgaagttctaacctacatcttaagcaccccgtggaaacgtatcgctacctatgaagttccagcggatcttcctgcctgccctgagggtggctgcacctgtgcttggctctgggtaagtggatggatcaagtataccacgatataaactaacgcatttgcaggtgccgaacggctgcggacaacctaacatgcaagtatatgttgtcacagtgtaggattttgactgctaactcgaaaactaggtacatggctggctacaagtgcaatgtgacgggctcaacatcatccaagcaggttgcacctgctcaagtcgcggcttattgcgaaggtgactcgaccaagtgtgtcaagggcgccaagcagatgattgctttcaaccgtaagatatttgaatctttagtcgcactttttttatacagttgactgactcgagcagaacaaaccggaaacaacgttcaagtgcccaatggcaagacaccgatgtacaacacggcctggggttgggaatcaggtatgtgttcattccggacgactcttcagcaatgataaaaagtaatgacaaattcttacatcgacaggtgcccaaaatgatattttcgtgtgatcagggccaggtagtcatagcaagcagcttgttcatgaggtgattgtcacgatccacatggatcgctgggtcatatgcttcatgtttgcttgctcgctcgtttgcttgcttgtttactatatagtctgctggcttgtattccatagattgtttgttagatagccaagcgagaaggttggttgttggcaacgtttgcaaagggacagctatattaactggctgcttcctactttgcaacttgcttcttctttctctctatcttagttattttgaatagaatgcactctgcttcctttgcaagatctggcacgtcacagtggcgaggaaatacaggacggaagatagaagggaaatgaggaatattttataaggatggttgaatgatggacaggcaattaaatatagtgtttacctagtcgaatgcagtacttgatcttgttcttcctatagttcctcggtaatctctatgggagtcgggatacaccagctctatttaagcttaatgaactaaaatatgtcgtatgtcttattcagtacgccacaagactgtatgtacagtgtttacctattatatactaaattccatcaacggcttgaattatttccaaacgtccggatatattgggattctcccgagcccaaagcagggccatgaggctcggaacctcacattaggtaaatgaaaggcagagaagagtacgctgagcccacaccaatgcacccgctttcctcgtaatctagaggatggtcactcttgactacaattacccgggagaagatgaatttgaaggagattctggtgggattggatccctatctgactacgccatgctgaagaacctacttgataggtgttacagacgatgatttacctacccaaagtcccgttcgtattgttgcttctagcctctttggagcgactatatatagcgggggtgtatgtttgccgtgtacatatcctgattgaagtaccaaaaaatcttgtttctgtcttaataaatcgcttccctcaactgaaaatgattggaatcgaaggagactgggatacgccgccaatggataaagagatgtacgacaggacttcagaaattagatgtaccgttccatatccgtcatgtgatatggaagactggcaacgaggaagagaggtagcagacgaggactattgggccaatgaggacaatcttagcaaggagcattcgtctatgtagatcgatagctgggtattgaggctctaagtagcattgttgccgaggtaaggaggaactgtcacgtcacgccacgaacgtggtgtctttcgatttttacccgaatagtccacaggaactcatcgcgccacgatgtagctacgagacagacacaccttcatattacctattgtacactagtcaacataccttccactgaagttcacaggacgaccttgcaagtcccacagaggaccttgaggacttctaaggaagctatctcgtcgcactcccccccctcttctcttcactcttacgacttacacgcacgactaccaacatatctcataccaaacaaaccatccaaaggatgagcaaataaatgcattggaacgaaaacatacaatgtctattcaagggtcatcatcgaggctaacaaaaaaaagcacgaatccatcatggtcacggcgcccctcctagaacttcgtcctagaacgaagctagcatgggcaacatgaacctgttagatccgttcgcaagagccaggcccgcgatcgtggtctcatctcatccatcttcgattcatgactctttcccattgtcagcgcaactccccacacaaaccccggtgcccatggaaaaataaaatgggcgacagacgtgaaaaagcaatggaaaagcaaggatcaaggacccgaaacgtgtatgcaagagggaaaaaaaaaagttggacaaggcgcggagggattggaaacaggattacaggagaaattgggaaatggaatccgagaagacaaagagaaagaaaaaaaagagaaattgatatcttccaggttttcggaggaaacgccattgcaaagcataaagaaaacaaacaggttccccgcgttaaatcggggttaaggagaggggccccttcacatggtatcataagcgaagtcttcatcaatggcctagcatcaacccccatttacggcatggaaattatctccgaaacccttttactgcgaagcgcactgcacccgctcggcaccgccgggcacatcatcttcatcctcgtccatgccggtcgcggccgcgccgtgggcgcgggcctggtcgtgctcgttcgcggggtcctcaagctcgaaatcctcgaccatagcgtcggttgggggcacgatcttctcagagcgaggaggaaggaccttctccaagaggtctaggttctggagctcttccttcttcgggaacttgacatcgaacttgatgtataggttgccgtggtcgtggtggcggaacgagggcataccctggccgtgaataaccttgatggcatctgagaggaattgttagtaacaagtttcacaatatctgtggggaaaagcaaggcaagtcacataccaggaacgataacctcgccagggacaatgttcacggtcaaccaccgctcatcaaggtgttcaatgtggatggcaccgccggcaagggcggtaagcaagtcgatctcagcctggtagaacaggtcgtcgcccttgcgctggaagcgggggtggggcttctgctcaatctcgaaaacgacatcaccgggcatgacaccaggcatctggtcaccctcgccgcggaattcaatcttgtggccgtcccgcacacctttgtcgacgtgaacgtgaagcaccttgcgctcaacgacggttttcttgccgttacacttcttgcagcgatccttatcacggacgatctcgccctcgccgttgcagtcggggcagacggtctggaagcgctggatcatgggacccatctggcgcatcatcgtcttcataccgctaccgttgcagcccgcgcactccttgacagcaccttcctttccgccgcggccatcacagccactgcagatgacggacttctggagcgccaacttggataccttgcccttgtagatgtcctcgaggttcaccttgtgcacgtggtggattgtacgggccttcttagggccttgatcacgcatgccgccgccgaacattccaccgaaggggccgccgccgccgccgccgaagaattgagagaacaaatcctcggcgttcatgccaccgccaccgcctccgtgctccaggccttcctcgccgagctgatcatagatttgacgcttctccgggtcgcaaagagtctcgtaggcgtgcgacagttccttgaacttctctgcggcatcgggattgttggtgttcttgtcttcatgtgacgaaggggtgtcagctgaatgtttcctaaatttgctattggagtctcccgggttgttacataccaggatggtacttgagagcacccttcttataggcagtcttgagctgagcctcagtagcggtgggagcgacctaaatgaaagaaacaccgagtcagatttcaagcacgaatcacaccggtttcgagaaccagccaagtgtagctttgcatgggttaacataccccgagggtgtcgtagaactttgtttccttgaccattgtgaagtatgcgggggatcagaggcgtaagaaagagaatcgatattaggtattcccgttggaatccagaagtgaagcgggagaatagaggggaacaaaggcgaaagtttcagagtgcttttatatgagaaatgccaaacagacaacaattgcggttatttgaagtcctggctggggggagatgaaaaagtggagggaagagaaagggcgagatggtttatctgaacaatagtcgaagccaaaaaaaggctgagtaactttttttacctaggcgtatgagactcgtaagattacccactcaattaccagggcaactaaggattgacggttttccactgcgttttctttgtctcgctttgaggccgattttacagtttttcagtccagaatcgacaatttgctctacaatatgggctattcttcgtctccagctcttctggtggcttctatgtacatcctgaattggcccgagcgctgattctacgggattccgcggtcttcgatggaattcgcaagtcttctccgcgcttccatgttttgttttattacgctgactaacggagtatatttcacgcatcagaggaatgatcgcactccctaccaaatggctgttaaatttggcgatttattggcctcatggcatacacattacatggtttttgcatattgtttcctgcgtgcaatccctgtgtaccagaaactcaacaatgcagaaatctcgaagccctcgccactatcgagctaaaagccacccttcagccacatatatcttatcgataagccaagaggcgagggggaaataaaagctcttcaaggtccactcggttccctcgtcatagaggggttcggaactctccgaccatgccgattatgccttggagtagatttccgtatctcgtagtcttcttatcttgcccctctacttcgtagctcacactcagctcacctactacacactccgaaatggaacaagatcttggattcattgctgccgtcgaagaggcgaagcagggcctctctgagggaggtgtgccaatcggtgctgccctagtctcgaaggatggaaagatcctcggccgtggtcacaatatgcgcgtccaaaagggaagcgctgtcttgcatgtcagtatagcatgatatactgcattgatatcaattgtcgatctatatctatacccaatattacagcgttcatagactaccgctaacacacacaaggccgagatgtctgcccttgaaaactcgggccgtcttcctgcctctgcttacgagggtgctactatgtacaccaccctctcgccctgtgatatgtgtaccggtgcttgtatcctctacaaggtgaagcgcgtcgtcattggtgagaacaagagcttcatgggtggtgaggagcttcttctcaacaagggcaaggaggttgttgtcttggataatgccgagtgcaaggaattgatgaccagcttcatgaaggagaagcctgagctatggtatgttgtgtttggtgctcgatctatcgcaatgcgtaaagcggctgtcggtctgctggcagttgtgtcgaggagtttcggttgtttcatgatcgtcaatactaactgtagtgtctgctatacaggaacgaggatatcgctgtctaatttcataaggcctgcatatatcatagccctaaatacccgagaattgaaattatccacgcccaaaatatgtgtttttagatccaatgtagactttttatctgagtcggggaagaagccgaccgcttttaagattcaagaaaggcacaattatacggtcaaacggtggatttcctcaaagaagaacttgaggttctcggggtcgacgaatggagtgacacctacgttgagagacagttagttagatggcatacagcgccaaatcataaggttcgacttaccgtggcctaagttgcagatccatccctgcttgcccttcttgaaaccctcgaccatgggctcaacagtggcagtaatagcaggaggcccaccgtaaagcatgccaggatccgcattgccttggatagtcacacgaccgttggcaatacgcatggcatcgccggcatcgtgcagccagtccaagccgacaacattatagcccgaatcgcaaaggtcatccagagcgtaccaggcgcccttagcaaaaacggtcataggcacaggctccaagcccatctcctgcagccgcttggggaggttggcggaaatgtggcgcaggtaaggaagcgagaaggacttgaacgagacgggagacagctccccggcccacgagtcaaagacctgcaccagctgcgctccggcagcgacctgaagtgcgagatattccacacatatctcggcaatcttctgcagaagagcctgcgcctcggcagggtacttgtagacccatttcttggactgcacgaagagcttgctgccaccgccttcgaccatgtaacacagcagggtccatggtgcaccacagaagccgatcaggggcacccggcccttcagcttgtgtcgtgtaagggtaattgccttatagacgtagtccagctctgctttaacatccacattcttcgccatcacaatttcgtactgcccgtccgtcggagagtcgagtggcgcggggaaatgaggtcccttcttgtccagcatctccacgaccatgcccatggcctgaggaatgactagaatatcggagaagataattgcggcatcgatgaggccttcataacgctcaacgggctggagggtcaaggttgatgcgatttcgggtgtgcggcagcattcgaagaagtcacggccgcccttggcctcatggtattcggggaggtatcggccagctgttcaatagaaaaagaaatttcaatcaagtgtccttgggaacgtagtgcacgaataagtctaactcaccctgtcgcataacccatatcggaggacgctccaccttctcacctacgatttgtcagctccggccaaaactaagatacagagtaaacataccccgtgcagccctcagcagcaggtcgtttttcaaaggctcaaattgttcctgcattgtgttggtgggatatgcaagtgcgatggaggggggaagtgggattataagaaggttctccgggtaccgcggcccgtgattatcggaaaacatagtgacaacgctttatacccgtagcatcataagttcgttttcttcccgaggtctgtttttgcccaaaaaaaaaaagagagagagaaatgggctatacatgggtattttcatgtttattcgaatataactggaatccgagttatcacatccatgaacatatttgtgtgtttcgccattggtcatcaccggtacaacttgtttcacagaggttgatctatccacccttctatatcaatatatcaattaggacgttaccccaagataccctgttgccggtcactacgatcatagtatgacagtcctatggttactccgtagctcacaggtcaggccactggagctctcgggagcttgaagacgctctagcctgtttctaaccaccataagtattgctgagaaccatgactggagttcgattagacaggaccttttgtgggatatcttcggtagatctaggctattacgataaattattgatgtcgcagccctcgggccatcctctcagggtgcactctgacttactatttaccttgatgtgggaatggtagatataaaagcaatcatatctccccttgctgaccgaatagccttcctaagagaagattagatctctcgcatcttaggacctcttttgaccacacagtcgaggcaccactcattcgtaatggctattctttgttgcataccctaatcaatctaatcaagatataaacccaaagaccagggtcaatctcagcaatatcctatatgacaccctctcatgcggacttgtcaacctatatcttgctaaagacagtcaaaacgaagatggtatgtgtgaaaagatactagaaatatatattttgatctaggtgaagtgaattttgcggccatgcttcccctcccctcctttggacataatggagattgcttgctgcattacatatgtttttagaaatctaactgatcatttgctgtacattcataaaaagcatgctttcattcgtcgtaatcacctctcttccgcaggttgcccaagttgtacattgaatcattgagctctttctgctctttctgctctattatcgtaggcagacttgaggtgccttcggagttgattttgataaccatcgagtcctctacaggaatccactttccagaatcaagccggaatgtttcgagaagaggctgggaagacgacttccaagcacatgtcgaatcggattggcgcaaagtatccacggcaacaataatagagcctcttgaatcaataccgaccagttcaagaacgtttcctgacagctgaagtgtatcttggtgagttatcgtgttgtcactttcgagagtgtagcaaagaagttttgaagacctgctctcgacgttaggacaaatatagatatcatcaatggttgttagaacgtacccatcaagtgcaacaaagatagccttcacagaatcggaattgcctgccgtagacgcaagggaaacatcccaaatgccgcgcaccgtagtctctccctccgacccaggaagctgaattttttgtaaaatctggttttcgagccagtcccacacaagcagatagttgtcgccaccacccgagatgagaactttaggttcgaaggaagggacgcaaagactgctgacaaatgaagtgtggccaaagcagaattgctcaattacatgcgcttggggaacaccacgagagacacggatgtgctcatcgcgatctccagtcaggatgtaactccgcttgccaacggccgagtctgcaggccgggtcacagagattaattccgtcaacaacgaaacgtgaccaatgatgacttgatgctcgaagttcagcacagcccgttctgcttggttggtcttcgacagagcagcctgtcgcatttgttgctccaatgattcaaggttgcgttttgtgtgcaccgtgaggtttgtggcagctggctcatacggcttcgctggagcctggaccttcacgtactctccgctcggaatgagtgggaaagtgtacacatctccgaatttgtcacccgtcaagatgttgttctcatcgggagtcagggtaagtgcagaaagcttcttgggcattgtactatatatgatgagtttggcgaacctgcagatagaaaaacagccactcaccgagcactcaattgttggagtttgccttcgttatccaaactcaggactcggacacatttgtcctcagaggtcatgatcactacatatttgccgtgggcaacagtcaagagaggaatattggtccaggagttggaagcgtccttgtccgaattcttaggatttgactccaatttggcatccttctgttcctcggagggtgaagacagcttccttcgcttttctcggggaccttggctttcagatgcgggagccgcgtcagagcttttatcatccgcattcgcatctacggattgaggccacacatccaggcgctgaccactagatgcatcgtaagagtagagattgcgtccagcggtggcaataagaatatccgattggcctgctgactgcctgttgacatatcgcagacactggaatgggtgttggagaccggccatgatgaagtctttgattcacagagtgaaaatgatcaacgatctcacaaataaaccaattgcgtactactaattgtagtcaagaagacaacaaataacagtaatcgctcccgagattcctctgatcgaattccggccatgtctgtccatcatgggcgggtctactttcggaaccacgtgacccactagcgagcgcaccaccaaaattgattcccccgaaccgcacacctcttctttttttctcttccattaaccaccacaacaatagactttcccttaaacaacctatcttcactgaaatcaagaagaaatggggggcaagtccgcaaccaagtctgcttactttgagaagctgcgtgctctgttagtttctcaatggcgcctagcaattgactccattcaaaaattctaacaatcttctgttatagtctcaatgagtacagcaccatcttcatcgtgggagttgacaatgtcagctctcagcagatgcacgagatccgtatcgctctccgtggagaggccgtcgtcctgatgggtaagaacaccatggttcgtcgtgccctcaagggtttcgtcactgagaaccccgagtgggagcgtctgcttccccacgtccgtggcaacgttggtttcatcttcaccaacggtgacctcaagtctatcaagactaagattcttgccaaccgtgtcgctgctcccgctcgtgctggtgccgtcgcccccgatgatgtgtggatccccgctggtaacactggtatggagcccggtaagaccgccttcttccaggctctcggtgtccccaccaagattgcccgtggtaccattgagattgtttccgacctcaagctcgttgaggctggcaacaaggtcggtgcctccgaggctaccctccttaacctgttgaacatctctccgttcacctacggtatgaccatcgcccaggtctacgagaacggtcagtgcttcggcgctgaggttcttgacatcaccgatgagcagctcttggccgccttctcccaggctatcgctaccatcaccgctgtctccctggctgccaactaccccaccctgccttccgttatccactctctcatcaacggatacaagaaggtcctcgctgtcgccgtcagcaccgactacagctggcccgagattgatgatctcaaggaccgcatcgccaatcccgatgcgtacgcctctgctgcgcctgtcgccgctgccgccgccacctccggcggtgacgcccctgccgccgcagctcctgctgaggatgaagaggagtccgatgaggacatgggcttcggtctcttcgactaagcgccctctcgacgggatgcggatgccatgtattagatttacttgaactggcgcttgaaatagcgaccaggaatgaaaaaaacatgtcttggcaatggatttccctcggaaacctaggactcgtatgatggacgtagctacgcccattgttcgtttccacggaattggtgagttttcaatcccccaccccctttttgctcctaccccttgcacacccaccacctcatatcaccctggcggatgattataaatttttaaccccgagcatttacgcccccctccggggcgctctgaagattaaattaatgcaacaacaacactctaattttttgatgacgccatgcctttaccctcacacatgcttttgacttttaacacatttcactgaatttgcaaacaattgctaactcgtgacaagattacagacgctctccatacgacctgcgatagtagtaccgatatgttgtcgccgtagacaattgtgtagttgggtggctgtcggaaatcctgttcgctatctctatttgtgcagctgccgtaatagatggttgctcaatgaaaaatcgttctctcttcgaacttattgttcctgttcgtaatggtagccaccagcgtgtaactggttaacagtacaacataggattacgcatattttgtctagcaactccatatgaaaggtacataaatccaacgtgcataacgtcgatatttcactctccaactagacactccgtactccgtggtggatgggaaatgtgatcgatccacttgattatgagacactctaatagcccaacttaccctcgatcgatcaaacggcattccgatcgctgctgccccggatcggtcgattcccgcggtggatgcggataatgtattaaaatgaccttgtaggaaagggaaatcccatcacggtctctatttctcagagacgagatccaatgactggaatgagaggtcatggcgaggtctcagtaaggcatacggctcgtaaactacatgcggtctttcgcttgctttgagaactatgccccttcttcctcgccccgctgagtgaagccgtccgctgaaaaacagatcctttcaatgcaagttctagcgtggctgtactagaggacgcctgggacatggcagaaaagtggatagagcgcgggctcgttctcaacggcttgccattgggagttgctgggaattacggtgtaaaggcggccgtttctagcgccagaagctgttcttttcggtgtcattttcgacaggtcttaagttttatattagtgaatttccttttcgcgttagctttgccttttggggcttagcgtcctcgtaacctcccgacctcgggaggtccccgctgatataacccgctctttgttgcccaggtgcctaatatcggctttgttagaatctgcaggaagtgagacaaccttgaacaaagaacaggagccacctcatactgctaactccaagaggaaatgacaggagaagagttcccccaggcaacctgcgacagcctgagcaattacgcgcccaatctgacctagatagcctggagcgaagagctgaagaaagagacgcctgtaatacaagagcacttcaaaatcttttgatattatatggaggcacaagctatttattcgaactctgagcatgtcccaaaataacctcgtgctttgacagacgagatatcttaacagaccaggtagtgtagcaaaaaaaaaaaaaacaattttcgcatccacaagttacgtccgctccatccactgctgcagaacatcagcaacttgcaaactatttttctccatgaacaccaaatgtccatttccatggatgccgatatccgccagctggagatgttgcgccgggacacctgcctgttgcagaaaccggactgtgcaccagtcatacggcgcgtggtaagacgattcggtcgtcaggaccaggacgggcacatgggcaagattgacgagctgtctcggtgcgggggaatcggcctggattacgcagtcggaatacagcgacgagttggaagggataacatgcttcacgaggtcgaccggatcggccacggcgggcgaataggttagggggatgtcagtaagcccgtaggcgcgcgtggaggagttgctgaagattgcgtcctggaacggagggccggtgggttcgatcgagacgatggagtgaacgagatccgggcgcacatccgcaatgagccagggcatacatccgccctgggaatgggagaggaggatgactggggatccgatggtgtcaagcagggcggcgccggcggcctggacggtcgactgctggtaggttgctgaattgaggaattcgactgtcgaggaatagtaagtgtcgaaattccggtcgcccatgacgcccgtcccgttccattgggtgtgcagggacgcttgccgccagaggttgtatagcttcggtgcggtaaagcgctgctgcaacacctcggcactgtaggtgctcagcgttccattgccagggaaccaggcactgcggccgcggaaggtttgatcgatgatatagcatgcatatccctgagagagaaagtaagacgcccagccttcccctccatctggcttgttgagccaattctgccaacatcacggttaacctctaggaagggagagaatggttcaatgatacgtacggtgcctgtttgagcttgtccatggatgaagacaattggatacggcttggtaacacccgcggccggtgtcagtttttccacgtacatctgatccgcaaagatatgttggccagcatcattcagaatatattgtcctccaacatacatgtacgatcgctgggctggcacctcaccgcaccagcctgaagccgcgacaattgcccagatcaataataatcctgtcttgatatgcattttaaggggatggccaggggtcaacgaaacgacaaggatcatcagtcaatttatttaccggatttcctccgcggtcggccttcttgttggcccccacacgggaactacatactaacggagagatggggagttcactagttagaagctaggaaatatctccgtaaatggatcctgaatccttcgatcttggaatttcttttatgagtaatgcttggaaaatggttgggaagtgctcccttatgaggaagtttctgtctcttctttccctcttgcttacttcggacttccagaggcttcaaaggccatggattctaccctcatcattctttgggtatttacctgggtggcaattggcttaattgtccttcggctgttagcgcggaagttgagaggataccagttcgtcctaggcgattatttcgcaatgggagcgattctctgtgctgtcatacgcctcgccttggttcatgttattctcatctggggaaccaacaatatgtctggcacattcagacgcacgcacgtttttacccccgaggacattcgtcgtagagagatcgcgagcaaattcgtgctcaccaatcgagtgttctataattcatagtacgtgcgttaaacggaatccaaggtcggctatttctctttctcatatttcttttagtctctggttgcaaaagttggttctgcttgatacctatcgcagactgctcaggcaacttcgctgggagaaggtcacgatgatctcctatattggtatattcgcagcgacgtatgtaaccgtacagactgtgactttcacggagtgtgatccattcagtcattactggatcgtattaccggatcctggtatttctttccctcttctaatttctctcttattttcgtgtttcgttgaaccttctaaccaatacaggcaaatgctgccaggcacagctccaattgatcgtcctcggtatgcttccagtcggaaagatcggttcaatgtaatacctctaacattctagtttcctcaggtgtattgaatgtcatcaccgatattatgcttatcgccttgccgattccaatcctggttctggttaaacgatccgctgttgagtaagtctacccatatcaccatatgaatttcgttgacgagctctctccgctagaaaaatccagctagcggtcctcttcgccgtcggtctcttcatcgtcgcaatcaccatcgttagactacctcaaaacgtcaaaaatcccactgtacaagtgaacagaacgacttgggcatccgtcgagttgctcgctgccgctatcgtagccaacgctccggttctgtacggacttctgaagggacggagccaaaggtccaagtacgccgcatcaggagccggatcaactgggccgtcgtggcagggacttcaaaagaggtcggcaaacgagctcgaattagaactgcaacggatcagtcacagtgtgggagggcctgttctcggttcaaagatatcatccagccattatttggagatcgatggcgggagtagtcagtcgttgactcgaagcctagataagtagggaaaaactcgtacggagtataacagaaagggcttcaagccgagctaaacgtgggctttatagtcattcggtttattcggaattgtccagtgtagcactagatgcccaatattattgctgatccccttttggccctgtcccaaaggtaagattcggtggtctcctaggtacggagtgcgctatgtcagcgactttcaatataagcatgtagacatgttgcgtatcgaattatctgtcaatcccccctattaggaaatgacaaaagcgtaaattttacttctagacaatttgccatttgcaacatccttttaacgtgtggtcacctgtatcaatcatgctaagacccgctaagctaggaaaactttcccctctgctctctgcgttcccttctctctaagcctcgcaccgtaggtccatatgagaaaaggcgctagcaaaccgaagccaatcatgatgaacgccaatgtgctatttccccatccgtattcaagacgatcatatagagccggcgcgaatatagggaagcaaaaacccaagatacttcgcaagaattgactagaggcattcgctgacgccacgtattccctgtaggactctataacatactgctgtatggcttgattactgagaatcactccacagccaaacaccgatgctccaatgccgacgacgattcacggagccattgcttccgctgtccagccataccatgatagaccagctattaggaaaacaatccctgggaaaatcaagggagttcgatattcaggtgccgtctgtcctcgcttgtgtgtcagatacttccagagccagtcggtgactcgagcgccaccaggagagccgacagtatagccgagaacaatagcgacataatgaacgccactgatcaacaccgattgatgatatctctttgtccagagggaggcaaagctggtgaggacaaagaagagaacgccataattgtaggcgaggaagatagccatgatttgaatagttgactgagtcgccatcatccaacacgggcgcgcgagactatagcagagcttccttgccagtggttgattgtgaacatcggtcttgatatgaaaaaggcctgcttgtctccttttgtaatttgatggcctttcgatgaagcaacaaacgatgataagtttccggaaagaaaaaaatcgcatagataaccaaagcagcatcgaagatggaaacaacccagaaaagccacctccatccgatttttgtcgtgatgataccgccgaggatagggccaatagccggacccaacaaggcacgaaagttgcgatcgcataagaatgaccgcgctgctccggacgccaacagtctgccagcaccagcgctgtggttgcaaactctgtaccgttttccaggccactcagaatccgcccagccagtaaaaggcccctggtgtgagcaaaggcgcaaatatgttccacagtatataccaggtcgaagacaagatccatacccatcgatgaccgaacacttcggccaagagagcgagaaccatcggtccaaaggcaaaagcaagcacgaaaatcgagaccaccatgttggcttcgctctcactgatgccgaggccgtcaccaatattgttcaaggcgggtgccagcatggatgcactgataagggtcaccatgccccccatggagcacagcaaagtgatggcccatcgcttggacagggaccaattgaattgacatgcaggatcgcctggacccttccattctaccagtaattcgtcgcttgcaggatcgggatcgatatgtatccgaacttcgctcagctcggatgtacatggtttttccatttcatttatatgatcaatatgataatagatgcaatgaaaagcaaatcgttactatctacgaaaatacagaagacggggaaagcaacagttgatactgatttacactacggagtacctggccaggcttggttacaacgaacaaagaatagtcttccaaaagtgcaggggttagcagtcattcacgttgcttccggatcatctattgtccaaatgaaagagacacctgatctaacttatctaatctgatctagaaattgggcctcgaaactaactgttgaggtgcaatagctgcctgatgcatccctgctaggtccctgtcgtcaatcgaatatgattcgcccaagtatctttgccattactagcaaaacatcgaagcttactgaacacaccgtaaaagattcttattttgattgtttccttacagttggatgtgtgagtaaagacccgcgaagagatactattgttgctacttttcgaaggacggttcaggaggtttaagatacggccggaatcatgtcggccctcctctcgaacatgatggtttgctgggccttcgggatttcaaatactggatttagacatgattctgaacaaacatttggacggatattgtgttggaagagagctaggccgaatgccttaatattttggcgctagagctctggcgaaaggaatcgactatagccttcttactgattgttctctgggatttcaatcaatttgaaacggttaagccaacccaatgatcactatttcctctaaatcagtatctaccgtttaactgttccatttggagctctgactagccatcgaaattaatttcgctctgtaacataaatgcagataaagattctataccatgtgcttttgctagatgagaaaccttgctgccattgcacactccctcgctacggtgacggtatgtatgtccatggggcatccagttgatcttcgatgtcttcaatgcgcagttatttgggccaaatgagaatctcacgtaagtcttcattgcatcacgtgccttctgtgtacccattaaaagatctatcgttccctctacgctttccgagtgttttcgatagcctcttcagttcataattatttaactaggcaataagtcctcagttatcaagtcttcaaaatggcccaaaatgaggatatcaacccacgcccattcaacccccgcccattctgtcccgatcccctagtcatcgagcctcagcaacgtattaagcagcttagagaatacctggaagatccggctcccaaaatgcaacgccacagaactaacattcaaggactcatccgaatgtatgagactggggaactcgggccccttgtctttcctggtcaggagacgatctggatctgtgaggggaagatcatggatccgccgcctcgccttgatgaccttgcgcacattattccacattatgccgtatgggccgaggacagtctctaccttctacctttgctacattttaataattcctaaccattcatctagggattatatcaacagttgatgcagcagattcctccccagataactaccttgaaatagtgatcgaaatagtgatgtggtatagtggcctaggattgatctgaaccagagggatgagtctccgtggcgcactggaactactatatctcgttgattatcgttgtcagtgcagtcctacataattagtcaaagtttacgatggttgccttcgaagagaacctcgcagtaggaagtaactcatgtaagactatcagggtgaatatataatctggaagcaatcctaacaaacatcgcttggccacatggaattaattgattaatcacaacggtgctattaggttactaagataccatattggaagcattcagttcgcctttaccaacttgataataaaagagccctacacaaggtggagtcacagtgcagacctactggctgaattccattttaccagaaacagctccagtgcactgaacatttccattgtaatacagcaaaggaaccttcgaagttcaagttcctctcagagcatcgccactgtaacagagtctaggaacaagaaggctctctcatgatatgcctgagatagcgtccgattgtaccttcttgtctcttttcggcacattttcatgtatacctgtgtaggtgcaaaaccaacgtctagggcaacgtataccttctgacctgatagaagaagtgaccggaaaactggagttgcaacgtagcccacgcgtggtatgaaggtgaccgccgtactcgtacttatgtgttggttccgtcacaacttccgtggatgtatagagaactcgattgtcgtgttcgaacgataatttgagcatctccctggatctagaacgggatgactaacctcaatcctaattcgtgtgttaggggtaggggaagcgttaataacagcgagcttcgcggatgcttgcgcggatgcgtaaaaccggggctccgagcccgtccgtgatcgttctcgggagcttctaatattttcaatcttgtcataactccgttccctctttgtcttgcggaaagtagagctcgacacgtccaggaggaagggccctagctcacgtttgggcgctaagcgtaacggaactgaaattgttaggttcatgttcggtatgatgagggtaggaaacaaaaggataatggagggcagagcacgggatctgaggatgagtgacaagatattacttactcgaccatatgctgtagatattcaagctaggacaaataagtgcatgcctttgttgcttatacttgggtactcaggcgtatgaatcaacttcttccacttgtaagtataactcagaaccgcgttgccttcccggaacatagacctataatctctctaactgtacaggggttgagaaaaatacgacacagtcacacagacaaaagggagatgagaaaagacccttactatggcgtgctcggaataaatctccaaaaaaaaggggactcggggaccaggaatacggaatcccgagcgagaataaacgaggctatgttggcaagggcgagaaataaacgcaacaggaaatttgaagtcccacaatttaaccaaccgaatcactagtcaatataggtatatgacaaagttctcgtataaaacaagccaaacgcctcccgtctaggcaagacgaggctgaaatcgaagggcatctccgaggagaaggacaagaataatgtacgatgtacttcgtgtcgcggagacccttattcccatgaggacggttatgccaccataaccatgtcttagagtcagctggctcagatgaacggcacaacgccacattatttcctttttgcctcttcctctcggctgtttcttctcttgtaagcctctattatatccacaagtcttggatatgcgcctatgtaacccgtagcggcaggaatgtcttgcgtgatatggtcgaaagtgccaagggacgcactaggaagacttagcaagcaaccaaggtggaaaaggtaaacagaaatagttgatacgtctgctagtcttgtggcaccatgttttaagttaagggcgcatctctaagaggtattactccgtacggagcactgctttagtactttattatttacaatatcccgctagatgcgggccgacgagaaagctcgatgacgtgatttagatcttgattgcgcctttacaaagtggatgaaaagtctgcaggtgacagggggaaaagacctgcatattctaggtaagcattgagctatgccctcaaatcttggccgttggagagtcgtagctatgttgtatggcttcgtgtcgagggtttctctactgggctgacaaggttctgggaaagctggtcgcttacggagtagaaattgcgtgactacctccgtatgcaaagaggcaatggcctacggagtactccgtaaattttgtgtgcatgctcccctacatccggagtatgcacctaacagatagagtagcgccgagcccaaacgggaccccacgcgacacctttgactcaaatggattaaagatgaatggactactccgtaacgggtggaagggacgcggcagatgagcaatataaattagatcccgaggtccgtgtggagctgtaggcatattgctcccgaggtcttgccattagaaaaccaccgttgaagctatacacttatgtaaacatgatattcaaggcggtggccccgggctggaataaagttaatcagctaagaagattcttgaaacaccagaaaacccgccggagaacgtaccaccaaagcgtggaacctcctttgtgcctttcaccatctcttctccagattgcgtgttctaaacggtgtgtgattggtctttgggtcccactcgttgatcttcttggcgcaaacctcatcaggacgcgttgccattcgtcacccagaaccccttggcactaccgacagcttgtccggtttagtcctcggacgtttatattcgtcaaggttatgatgacatggactcccaggcgaggcgaatatcatgagaacaatgaatattccaagggcgatgcgtgatagtgcttaaaacaaccagcacataaaattcaagtatcccgcctcatctcgaccacggactgcatgcaaaaaaaacggatatactccacgacccgtcgtcatttctaccagaccgagtgggacctgcggatgtgcgagatcgtcggtggacccggctgccgcgtgaaattcgtggtttttaacaacgtgggctcgctttcagccaggttttgctttttcttgtgaattttctacctcaaacttgcacttgatacaagtctagccctcgtctaatccttgcatcccttgccggaagtccaacccaagcgagccaagcggaaaatttcaaatcttaatttgaatctggggagctcagatattgcgccatttgggatcgaatcacgcatccaaccttgtttttattttctttattctttattctctattccttattgtcgtgccatggaaagtgcatgatcgtctgatttgacattttctttttatactcttgatcgtcaccacatctctagggtttccatcttttcaagtcaccgctgccaacacacatagcggtcctggaagcgtcgtcaaatcccggcatttgatattgtcaactccggtctgtacaagcgtgaccatgtttgaaaaatggagcgaggccaataccaatattggccattccctggccaaggtcctcggtatcaagctcgcatatagagaccccctgggtgctaccggtgccggtgagaccgtcacaagaggagaatcggcattttctatgggcaccgtcgacacatactcatacaacgagcccgagccgacaagcatcgactgggttcgcgaggtcaccccgtccggagcccagatagccagatatttcctccatctgttccctttcctcacatggattaccaactacaacctacaatggctgttcggtgatctggttgccggtatcaccgttggagcggtcgtggtgccacaaggtatggcctatgctgaactggctggactgccggtacaattcggtctctactcctcgttcatgggagttctgatctattggttctttgctacgtcaaaggatattactattggggtgggtgatactgcgcccggtcgaaaccaaaataaaacattgctaacctcatctcatagcccgtggccgtcatgtcaactcttaccggaacgatcgtggccaaggtccaggtagaatacccagattacccggcccatttgattgcatcggcccttgctgtcatttgcggtggtattgttctagctttgggtctcctgcgcatcggattcattgttgatttcattcctctccccgctatttcggccttcatgaccggctcggctctgaacatttgctccggacaggttccgaccatgttgggcgagacggccaaatttagtacgcgcggtgccacctacatgatcattatcaacaccctcaaatacctccccacttcgacattggatgctgctatgggtgtcactgcctgtgcaatgctgtacatcatccgttcaggatgcacttacgccgcgaaaaagcagcctgctaaggccaagatgtggttctttatctcgactcttcggaccgtgtttgtgatcttgttctacactatgattagtgccgccacgaacctgcaccggagggataaaccagcgttcaagatccttgggacagtccctcgaggattccaacaggccgccgtgcccactatggatcgtaagatcatttcagccttcgctggcgaacttccagctgcggtcatcgttcttctgattgagcacattgccatttccaagtccttcggccgagttaacaactacactatcgatccttctcaagagtttgtggccattggtgtgagtaaccttctcggacctttcctcggcggttaccccgccactgggtctttctcccgaacagctatcaagtctaaagctggagtgcggacaccccttgctggtgtcattaccgcgatcgtggtgctcttggctatctatgccctgcccgctgtcttcttctacatccctaaggcttctctggctggtgtcattatccacgctgtcggcgatctgatcactcccccgaacaccgtttaccagttctggcgcgtgtctccgcttgatgcgcttattttcttcattggtgtctttgtcactgtgttcacttccattgaaaatggcatctactgcacagtctgtgtgtcggttgcagtcctgcttttccgtgtggccaaggcccgcggtcagttcctaggccgcgtcactatccactccgttgtcggagatcacctgttggatggcgatggaaagtacggatcattcggaactaacaagactccctccgacgatgaagaccgccaccgccgaactatcttccttcccatcaaccacaccgatggctccaacccggatatcgaagtggagcagccccttccgggtatcttcatctaccgctttgccgaaggcttcaactatcctaacgccaaccactacaccgattccctggtttcaaccatcttcaagaacacccgccgaacgaacccgcacgcctatcggactcgcggtgagcgcccctggaatgacgctggtccccgccgcggcaaggaaggcagcgacgacgactcacacttgccccttctccaagccgtcattctggatttctcatctgtgaacaatgtcgacgtaacctcaatccagaacctgatcgacgtacgcaatcagctagatatgtacgcctccccccgcaccgtgcaatggcatttcgcacacatcaacaaccgctggacaaagcgcggcctggctgccgcaggcttcggttacccgacacccgtcgctagtgacggcggcttccaccggtggaaacccattttcagtgtggccgagatcgaaggcagcgcctctgccgctgcctgcgccgaaatgattgccaaccagtcccacaacaaggctacagatatcgaatccggcctcaagtccgataccaacacaactgcacgtgagactgacggcatcgagaccgcatccgagagctccgaggtcatccgcgaggacaagttccatcgtgatatcacagacagcaaggcgtaccagcgtcgtcctaaggttgcgctcgtgcagggcatgaaccggcctttcttccatatagacttgaccagcgctcttcaaagcgctgttgctaattcttcggacgtgattccacacattgagtgattttttctttctacgtttcatttgctcttcgatttgcacggcatctcttttgctacccttttgcatcgattcaattgttcctctctggcttggagtccgatctgatataccccgatttgacctgttaatatgatgttgatgtttttattttcccattttcccctctgtactttttgtcacttagcactggctatattggatgtatttcatggcgttgaccgtgaacaacctgttgttgtggtatattctttcagcactattcccttgattcgtgtgggttgatttgattgatatgggtcttgtttattggcccttttgcatctgggaagaaacggatttttttgcgatggacatggttcctacttgatttcttcttaaggagatacataccctttctgatacctatatctgatagacctgcttggtgaatacatgtatattccacctcatcgcttgaacatagcctgtgtagtctcttgcctcacacccccaccctccgcgtaaccaaccatcaacaaatcagccttctgatctgtccgaatgccagagatctgattcataactcttccaagtctagccgcgcaatcctaattgacctgatcacatatggctccccattgctggatttatcctcgatgctgctggtggggagaataagaggattacaggctactgtccggctattgtccatgctggtgcaatggcttctgttgcttctatcattcggctgaagactgataagcaacttcttacgaagctttaggccaggtgggtaggagttatgggttggagaaatccaatattgtaggataccgccctgtaaaataatattgctcaaatagagaaatatatagagaaaagacgagttcacaacaagcgaggcatatacatagatggccgaggttcaactgggccccatagttcaagtactgcgaagtacgccgcatccaccagaacgtcaacctcaagtctttttcttctattcggatctcatttcccttctccagagatctgttcgaagtccttcaattcaaaatgactctgaaaccggtcaactgcctgagacgcccagcactacactgcagaaacctagccgttcctctacgccaatcaccaattaaaacatgcgcgcaatatagctctcactcaccaatgggctcaacaaccaccagcacacgcaaaaaagtaacaatacaaaccatccaaaacctctacaaaaagaacgaacccatcacagtccttacagcatccgacttccccagtggccatgtcgcggacacagccggaatggagatcgtgctcgtaggcgacagcctcgcaatggtcgcaatgggcatggaagacacaaacgaagtaacaatggacgagatgctcctccactgccgcagcgtaaaccgtgctgtcaagagcgccttcacagtaagtatatccatgcatacatatacaatgcctacgcccggccaagttaccacatctcacaactcgctatagatcgcagacctaccaatgggctcatacgaaaccaccccagaaaaggcacttacatccgcaatccggatggtgaaagaaggcgggatgaagggcgtgaaactcgaaggcggggcggagatggcgtctacgatccgcaagatctcacaagcggggatccccgtcatggcgcacatcgggctaacgccgcagcggcagcactcgctgggcgggttccgagtccaaggcaagtcagccgcgggcgctgtgaaactgctgcgggatgcattgactgtgcagaaagccggtgcttgtatggttcttattgaggctgtgccgcctgagattgcgggtattattacgcggcgactgagcgtgccgactattgggattgggtctgggaatgggtgttctggacaggtgcttgtgcaggttgatatgttagggaatttcccggaggggaggttcttgccgaagtttgttaagacgtatgcggatgtttggggggaggcgaggagggggattgaggcttatagggaggaggttaagagtagggcttttccttcggtagagtatacctatggtgtttctaaggaggtgttagaggagtttgagaaggttgttgatgaggttgcggagaatgaggagtaataaaccagcactcggtgtatttttgggtcttcagctgcttttcaaaacaatctgtacatgtgctgaagactttggactatagtcttggccttcaatatctgcccatcagaggtgatggcaatgtattgtttcaagtcggttttccgcatgctttaggaggcaaaagcaatggaagacaaaagtctccaagtatgaattaaaagcatagaacaattcaattcgtacagagcatatacagcccccataaacatcacccaatcaaatccacccgcagctttatccaagatcctagaagctgatactcttttcacctcaaaacacccccaacaccagcccacccaagaacaaacccgctaagcgcctcactcataacaccgccaccaaaccaaacatcccgccaagcgcccttgcggataatcttcctcggaccagccttgccagcaagctgcatgtgcacagccttgctcttctcattcatttcaataacaccctcgatctccccaggggtactaccggggaagaacgagccggcacctgcaccaccggagcggtgaatcagaaccgcatggaagagccctgataccaggatcgtgccgaggaagtagaaggcgaatccgtagcctgattggagggctagaatcccggcggacaggccgaggaggaaggaggttaggctgtggagggaggagaggacctatttcccgggttgttagttgggtgtaacatctaaaatggaggatacagatgcggtctgatattggtgtaggggatatgatatgcatgtggtgcgggataggggcggttgggtgggatgtgggatagtcatacgcggttgttgtgctggacagcctcaggtacaagaggggtgattagcagggagagttcctgctttgtgggtgccattttggctggtttggtgtctttttattcgccgatttgttgtagttgatgtctggattgagaggttgagctatggctctcggtgttcgttgcgggtagtgatcacgtcttgagcgaaagtttgctgagcttgactaagatcacaggccttctgctctccaatagtgatgaaattgttgcaccgggaaatagacttgtgaaggggtggtcacagcagctctcggcttgaactgatggaggtcggaagtggcagtgagtttctagaagtgcacggaccacatggtctttttattcagatgcttcagacgagtacggagtacggagtatgtactaactacactacattcaacagcataactaattaagaaagtatttaacgtaaatcaaatcactcatgttcatatctactattaaccacccaatccaatgttcaataatgccgagcctttctcatgaatccgttcacatcacagcgtttgatacattccgaatccccatgtccttgattatgctgcaaacatagcagaaagaaaatgccagttccatgatgtcgctgacttaaattcaaatatcacattaaaccagattttcgaatttgccatcgacacgggcctccttgacctgctcaaagacctgatggaaaaacgttagtggctgatcagaatcaaataacaagcaacgcttacctttagcattttgttacgtgcacccaaagcattgacaccgcgatcttccagggccttatcatccaggtcgaccagttccgtccattgcaggtccttcaggttgtcggtatacttatgcagcctgagggaccgcagccagctggggatatccttcagaagagccgggtctgtggggtcctcgggcggctttgagctgcctcggcgaccccgcggagagcggcctcgtgtaacctccgagtggtctgacaggtagccttcactaccgagaccaaactgcccaatgttcaaagagcccaagccattacccataagagggttgttgggatcataagcggccaaaaatccattgttctgcggtgacgtgaagcccatcggggtcaagccaccaccgtgcatggcaatgccgggcgatgttgggcgagaccgtctaccggccatggccgcctgctgttgggcctgcagggctgccagctgctgattgttgagaagctgaccggccatcaagtgctgtccacccaggcctgggctagccaagccctgggagagaatcgggtttccatgcgagttcttaccctggccatcattggagcgagcacggcggtacttgcgcgcgtcatccagagcgatgcggttgtttaccgtcgacaaagctgccagcttcattgccgtggcattagccaccatatctgcgtgggtgttggagttctggtgcgattgttgaccgaaagtcgcagtcatcggagtgttggtcattgacgcccagctgtggttgcccacattgtatggcgaaagcaaagggggctctatgtcgggggcgggaatatttgcagtctgaggcagaggggagcgcatgcccgagggctggctgaactggcccataggctggtgtccagaggatgacttgggccgagcgatcggaggctgcgtgtctgaaacaccacgctgagcccacggagagccgggttgttgaccaaggccgtcggaattgttgtcaggcgccgatatggtgggggccacgaaagaggcacgatcgaagactgcgctattgcggttcgatggaggtgcattgccggtttgctgggtgaactcggccttcttcttcgcaatggctgcagcagcatccgggaacatcgcattgatggtagaagggtcgaggacagagttgcgcttcgcgccaggggatggcgggggtcgtccgagggagttccgagaggtgtccatattaagcttcgacatagcgtcgctcagacggctagacatggcatctacacgacgaaaagtaggttagttacatctcaaaaggtagtgtgggcaatttgtcatacccttttcgccaaaattggcaggggagagcaggcccgacatcgggtgaccctgagacatttgctgcaggacctgaatgaaaaaccggatctgcacctgagtggtctgctgcagcaaggcatatagggccgcagttctctcggcttcactcagaacacggaaccattgctcgatggcactgagttcatccttaaagtcctgatcaagcgtggcagctgccatttcttccaatgtagtttcgtactgatcaatgtccgcaagccattgttgagcggcacggtccaaagcatcttctgtcgcattctgaccttgggtttgttggttgaaaaagacctccgatgatggacggatgcttcgggcggacagcggcgaaggaaacccggacatgtctgccgacgcccgcagctggtgcgatccgaggtttcgcgacgaggatggaggacggagagttgaattcgatgcttcaggagtgctgttgcgattgccaatgatatgactggccatggtttagggcgacgtgttgagaggatgactagtaaatacagtgggggaaatgattactgcaaaacacctgcaggacctgctgagtttgcgtaacaaataaaatcaaaaaataaccttcaactaggatccaggctaagatcctaaggtatcagacgacgctgaaaagatctagatctctcgttaaagatgatggcacagaccagtccagtgggctgcacctcggaaattcgagatagaaaaaattaaggcctggaacgaaaggaaattgagacttgaagcaatagtgtgtcaaacacagtcaagccagtcccaaagaaagatgaaaaggaaagaaaaagggggaagagaagaggttaggtggagagagaggagaggagaggaagatgaggaaagttggggatgaagaagtttggtgaagaggcttttctgtttcaggccgcgaaatcacgggttcgccgaggagaacctcagggacaacattctttcttgacttctccatatctcatgattctgaatcttgagggacctctattttctactctttcctgggaattctgctcctcgtggtcaaatccgaatattttcttcagcctagtggagacgttactatgaatatctgccgagcccagacctgagattcagcgcgcaccaactatactgataatgagcttccttggtggtccacgtttctagtaattgtctcaaactatagccttatcggcagtggaaaacacttcctattgaactttcaatcgtcactggctatgagttcccagcattacccggacgggattcctctggatgaggagatgcacgaggggcagtcggagtatccagatatcgatgaaactgttcgctatccctggcaaaatgatcaatcttttaatgttggcgacatgcttgcctcggtgattgatcctcgtttgtttggggaccaaaatccacaaatccaacggcaaagcatcaatcaatatcctcaagatctcaatgaagaccaaggcgaagtcgaagaagagcaggaggttgatggactctacccggatgaatatgacagccaggggtatcccccagtatcatatcctcccgtgcctggcgagcaagccgtgtcggacgaggactttaccttatctggagacgaaagcgagaggtacgtaagttaagacaccatatctccggttttagttaacatgatactagtgattctgatgaagatgaaccagcagaggatgatgacgatgatcattcagccgccagcaggcgccgccgtcgtggcggggggcgcttttccgcgagatggggggcccgnnnnnnnnnnnnnnnnnnnnnnnnnnnnnnnnnnnnnnnnnnnnnnnnnnnnnnnnnnnnnnnnnnnnnnnnnnnnnnnnnnnnnnnnnnnnnnncccccgccagcgggcgccgccgtcgtggcggtggtcgcttttccggaagatggggcgctcgcggtggaaagggcatcaaaagaggaccacgcaaaccattggagcccagtccggaattcaagcatcttcattcgggggctacctctgccttcatcgatggagactacgaacgggccattgatctggtgatgcaagcaattcagattaatcctgaaatgtttgctgcccattctttgctctcggaaatcttcctcgcacaaggagagaatgataaagccctagcagctctattcaacggagctcatacgaggccgaaagatcccggtgtctgggtcaaagttgctcgactcatcttagatcgcgccggagagaatcggcagtccgcattgcatgatgtagcttattgctacagccgtatcctcgaagtcagcccctccaacaccaatattcggttccagagagcagcaatctatcgtgagctgggtcacaatggccgagccgcagcggagtatgagagattactcaaggactgcccacacagtgccagagcactgcgccatcttgcagagacgtacattgatctcaatgacgtacaaaaggcagtagattattatgcggacagcattgatcactacctatccatcgaccccgaagcctctgatttcacctggtcggatctcaatatctatgttgaactttttggctatctcaatcaacccgaagaaggactcaactctttgagaatacttgcacgttggcttctaagtcgcggagaagattcagtatgggacggccacgaggatgacgacagagaatgggacgctgatgattcgccacgacggatcaaaaccgatggttttctgcccgatcagtggcctcgagagtcatatgggcttggtcttccgctggagcttcggataaaaatgggtgtttttcgcctgaaattgggcgacaagtatcacaacgaggcattggtgagtttgatcccggatcacggtaatgactgaataaactaatacaatcagcatcactttgaatggcttaacccagaagacgactccgaaggtgcccgaattttcgactatggtgatcttttcagggaagtggcagatgctctaaagcaagccggtctcttcgaagaagccctccggtactatacgcccatccagcagaccgccgaacatgccgacattagcttctttatggccatggctgactgctgcatgcagttaggcaagatggaagatgctgaaagctgttatctactcgtcgctgaacacgatgccggtcatatggagtcgcgagtactactagcgaagctatatgagagcctcgggatgagcgaacaagctatgaaatatgttggcgaggcagtcttgatcggccggcaggaaaatcgtagccgcggaagaagaaaggacaccagacttgaacagcttgccatagaattcaagatggctgaatcagaacccctccggtcaattgcacccaaaccgacaaatacagcaccacttatgaatgcagctccttcggctcctggcaaaggacgggcgcaagctggcgaaggtactcggagtgatgatattcaattcttgtacgcgaagttgttagagttgaatccccaagtcaaagacggtgtccctctggccattgaagattggctggacattgctgatgctctattgcgagatttccggaacaatcgggcattctatccaatggatcgaagtattgctttcaggggatattcgactggtgtcaaatccaagaaccagaccaaaaatggcacaatgatggatgaaatgcagcaaatggcgggccgtcttcaagaaaccatgggtatgtcacccgggtccatcctccatccacaccatgctaatgttatatcaaggagatttctcggaggagcccttgcagggcgccattcccaccgactaccatggaataccatttgatgagtggcttgacatattcctgcagtacgctttactcgtagtagaacaaggcgaaccagaggaggcctatgagacccttgattctgcggcgattgcaagcatctggttgcactctaagccaaaatcccgattgatacatgtttgttggttcagtgagttcattcaattcactactgagtggttatccactaacacttttacagcatgcgctctccgcgcacgagatgaagagacactggctaatgaagcccgttggtttatcaaagaataccagtttgtcaccgatacttatcgactcttctctatgctgggccacctatgtggcgaccctcaccgatcccttttccattcctccggaaacatgaaatttatgcttcgtcaaatcaaggcaatagactttacgatgccacaagatacgcctcgacccattcggcattctgtctggaaagagcgcgccactctatccacacgggatgaagccggtgagcctatcgctgcgaaagagttagatattgctcttctggtactttatggccacatgctgtactctggaaacagtttctatcccgccctgaactattttttccgagcatatgccatagatgaccaaaacccggccgtcctcctctccatcgcactctcattcatccatcactctctcaaacgacagtccgagaatcgtcactaccttatcatgcaaggactgtcattcatgcatgaataccggctagttcggcagaagccgggaactcttctagctgaaaaacaagaaatggaattcaacttcgctcgtgtttggcactcgcttggtctggcccaccttgctgtcgaagggtacgaccgggtgttaaagctcggcgagcagattcagaaacaggctaagcaagagtctcttcaagaagtgacacctgcaatggatggtggtgatgtggtgatgggtgatgatggccaacaccaaaagacttcatcgcctactggtcagcctttcgttgaggatttctcccgcgaggccgcttatgcgctgcagtgtattcatgttctcagcggcaatgcacagacggcaaaggccgttacagaaaaatggcttgtcatttgatataagttcgtgtctgctttccagactgtctattacttgtaatgtatttatatgagttaaagcctcaaaatcaacactactgagttaattcataagccattatattcaaccagccttcacatgaatgtgatatcaagataggggatataaacccaggacctgtgaatgtcgttttaatatacggagttactgcatgtacttctgtagatagaaattttgacgttgggttgtatcacacccaagatgggagtatttctttctcttgatgtcattacttcaagaccttgaccaacatatcctaaagagaatgagctcactgctgcatacctctcctttattacataacgggatttcgctgcagagattatggggttgcatttgcctccttatctttcaacccccaaggttatattacatattgttctcgcttggctgggcgaaagggaggggactctggttttgagaggagtcagttcggcatcatttcagtcagtggaaacattgaacggggggaacaaagaagttgagcggctgtgaactaaccctagttgacaagaatgtggggagtgcggaaatgcaagcggaaatgcaattgcaattaaaatgcttgctaatcaacatctcatatacgccttaccattgtggcttattactagctcacaaatgactttgcaggccgaagtcataattctttcgagtcggttcggccctacctcgcataaattcaccttaaacctaatgctcgtgtctttcggcctcgttgatgtcatcgagtcattgatatagagaagataatacggccacataagattctaaaccctagagaatgactgcggatagcacccaaagggtcggaaaccattccagctctcaaattgaaggttctgcagaactattgccgatcacattggcgcaatccaattctcccgcagcccaggggtttgatgaagacgaaaaagaccatgatgtcaatgtccaaagcacggcagaagagtcaatagggaagcgcaagtattggagacgttttattgatgctgtttcatggacaccgccgcgatgtcgatggaatacagagaatccgatcaaattcggcttgcctttgaatatcctgttcgcattctcggcaactttcacggtatagcactgagagattgcaatatatggcatagcaattgctaatatggccatgcaggtcgccaatctatactattcacatcccattctggatattcttgctcaattcttcgatgtctcgcatgagcgagcctcgctgatcccgacctgcagccaagctggatatgcgacaggattaattcttctttgtcctcttggtgacttagttcggaggaggcacttcgtattgctcctgacgcttgttactgcggcattgtgggttggtgtctgtatcaccaagtcattcgaggtattccttgtgctgagttatctatcttcggtcacaactgttactccagtaagtggttacaagcaagcatatccgaggctctggcctaaacaaaaaaattaatcatcaatgcagcaagtcatgctccctctcgtcggagatctggtccccccagctcgtcgcgcaacagccctatcaatcgtgtcttcgggactcgtcctgggccttctctttgcccgcctgctctccggtatagtcgcagaatactcgtactggcgaaatatctattggctatcactaggcctccaattcctcattttcgcccttctgtggctgttcatgccggactatccgtcaacaaacaccaatatttcctacttcaagatcctatattccatcatcggatactactggaaatccccagtgcttgttcaggcaactctcatgggatttttcctctcggccacattcaccagtttctggacaacactcaccttcctcctatccggcgatccctacaactacccaaccctgacaatcggactattctctctagcaggtcttacacctatgttcctaggcccactcttctcacgctacatgatcgacaaattcgtgccgcagttctccatcctcgtcagtttcagcatcctgatcaccggcgtcagcgtcgggacctatacaggcacatatactgtcgcgggcccaatcatccaggctgcgctgcaggatttcggtctacagatgacgcaagttgccaaccgtgttgcgatctacagtgttgcgcccaaggcgcggaatcggatcaatacgggatacatgattggcgtgttctgtggtcagctcatgggtacctctgttgggaatcgtctctacagtcaaggggggtggattctgtcgggaagtgtcaatatggcatttattggggtggcgctgactatttgtcttcttcgtggtccggctgagaagggatgggttgggtggcatggtggcattcgcatccgaagaatagagtgaatcagagtgatgttctgccgtgcttgggcttttgtgttcttctacagaaatatagttcctgctaatatgctttacgctagactacatgtgcgtagaaccttcaaaagtatcagacctcttctatttatttgagatttaatgatcaccagtgcatttaacagcaagcttataaagaaaacccacggtagacatatagtatacgccaaactgctgccagcctgctgccagcctgctgaacttcgaaaggaatttgagtacttatctatttttagttatgtacgatgacgtgaatcagtccaatttgtgcagattaattcaacgacgtcacttgaaaaagaatggctactacggagtactccgtagttgattcaagcttgagatccactttgacactcactctcaagattgtagtaagtaaaaaagaagcaaaggtacggaaagaccgattttgtaaaaatgatagaaaaataaaaataaatgcatcaggagggaatcgaacccccctcgccagtttacttgataaggagatttcctaatctggaagactagcatcataaccactagaccactgatgcaatggatatgtttaaacgtcaaccagtatggttcatcaagtagagttacatatatattggtctccgcactccagcatcatacatgtctgtgaaacactgtctgtccagacatataatcccggcgacgctccactaggagataagggattgggcaatgtcgaattcaataatagatactaagactgtgatggctacacattccatacaacatggttacagtctgcgggctccggcggccgatcaccttagaggagataagtggcttcaaattggcaaaaaaggagaatcatctccctaagtcaatcaatgatattttcaagttgatagagcagatgctagtgagaatgttggtctttgtcttgctgttgagtctaagcctacatccagctagtcgccagggcaaattgaatgatttgtgtagtaaattgtcctgtcgggctgtatgattgaggtaaatattggtgactgattactcagggcactttctacgattgatggttggcacatctgttgaatatcaatatcttattttctagcgctgtgatattatctgcactgccagttgagacatctgttgttctgcccttatatctagatatagttaatttgctggtaatcacgtagcagccatatttcacagggatatacgatttgttagagcctccccttggctattggtcctgggattgatttttacacctgtgatgaagaggacagcgttatatatctttttttttttttggaaagaggtccactgattgagtaaaccacctttataatcaacagccgatcctaaattgagtgtggcgagataaaacaggtatgcaaatgcaacgatgtcaaggaaaagaatgaatgagcgggagtagtggcatactccctgcaagttatctgagctacttctctacagccttgtcatggattatcccaagcgacagcctctaggtgggaagcctgtatggcttgcaaatccaacgctcaatatctcacttaagaattgaggtgttctttttctctctcttttgagtgaggacctggtagctaagcagatactcttggccagccttattcggatagtcataagctgtctgttgcaaataggacgatctagacaactcagagcccgaccagtccgagatgagggtgtaggcaatcaggattggctttgtcaggaaacgcacaaatagctggtcttaccagaacctgcgtaatcatttccatagatttcaatataattgtacacatgttcgtagtaaagagaacaaagttgaatagttggcagtcaaacttaaacttaaatctatgggtatcagcgtctacaccgtagatgaaacggctatgctaggggcattcgaaggaaacgcagatatattgtcaacgccatatttgtcgaccaggccgcgtttggaactcgcagcacgaacggcaagcaagtcgcaggctgctggtgttagaggtgttggtcgctcatggtgcttaaagtacaaatcctagactatgggtagccaaattgtgtccaaagtcaatgatcaaaggatgaagatagaaattttgcattgtaataaaaaattggagagcggggggggggggggggccaccccaaaaggaaannnnnnnnnnnnnnnnnnnnnnnnnnnnnnnnnnnnnnnnnnnnnnnnnnnnnnnnnnnnnnnnnnnnnnnnnnnnnnnnnnnnnnnnnnnnnnnnnnnnnnnnnnnnnnnnnnnnnnnnnnnnnnnnnnnnnnnnggaggcgggggggggggggaggaccaccaccaagtgtaattagagaaacactttcttgcaaaccttgccctgcgaaggttccgtctcttcatcgtttccaatctcggtaatttctacttccttatatcagtgtctaatgtcagtgtcacccaatgagttaaggggcagtggcttgaagggacattacagtaatcagggagccatatctaacgcctttcatcaaagcccaatcccaatgtcgattagcgctagtaacccattttggctgtcatgatgcgctttggtcttcgaaactacagaagcactactaatgtaggtcattcttattcctactcgaattactcggttcttggcttgtcccaccactgccgcccaaagcgccagttggggctcggtacggatgccatttgggggcactgccagcaaaggcacgtttctagaaggagcatagcgctcagggtcgcatgcacccatctgatgcctgaatccctcgatctcaagtacccctcgggagctacctcacttttatactcccccgctcggccaagccgaatttcagcaaatggtagtctccgctttatcaatatttggcaggtgtccttgaggcactttgattagaatatatctcccccaactttagtattacacttgaagctgtctatgtacacaacatagccccgtttgataagaaaaagaaagaaaaacaaagcacatgatcaagcgcagcagaggcaaaactatatacgaggccaaaaacgatcagatgcatatcaataagacataagacaccttgctatgccgatgaaggggggtaagcgggaaacaaaaaagtaaacacacaatccaagggcaacgggtgtattatccgaaagtgcccaccaataccgtcaaaagccgcctgtcattactggatgttggatatccaaagtagcgggaagtagtattatgacgaaagatagggctgcaggtgccccgaagcagaaataacctagtttgagccataaactttgatagagccgctcgggccgcctgtctttttctctcagatgaccacggcatcctcgtcccgatagtagtctggatcgtcaaagaaaactgcagactggcgtcgtagttcctcgatcacgcttccccgccgggaactgggggtatgaggacgtgatgagccggttgattgagacatgctatctgacaagtcaccaaaacgcgactcgttcttgtagctagatccatcgcgctcggggagattttcatctaaacgctccaccatagagtctgcatgttcattttcccgattgcggattcgacgggacaggatcggggagagcgcacgtccacccgttctagattcttggagtcctttcatgatcgcattctcgaccttgagccggttttggataaattggattttggagaaagtactctgctggccgacatgtatcatgcgggcgagcctttcaggagtgggatcggaaagaatgtggatgaaatcggaggggatcgtttttggccagatagttacagtgccactgaacttttgcaaccagatctcgctccaatcctggcccaaaggtcgtgggaggagctctaaatgccgaagaactcgaagccatttgttgaggtctaatttgatgtactgctcgattgcggtgccgaggaagcccccgcgccagccacggcccctgcggtgtgtgactggtcgccctactgtccctctagaactaaagaagaagaggttgatgtggggattgacctagggtagtgttagtggcaaaggttaaaacgtaggaaaggaatctcacctgggatacaatcgtaaagttgacgttgaaatgcaggttcaacgctttgataggtatatcagtccgtaggctaccatccttccatttgtgaccaaacgaataaggcgcgagagtgccatcacgctttttagtcattaatacaacagggtttaaaattcccggaacagccgccgaagcaagcacggcactccatatgacacagtcggggcatgtcagataattggctaggatagtcggtgagtgaggatctgagggcacgcaggtgacattcaaaatacgcccggtccgctcgtaagcttcacgaaaggtcgttgaacccctgcagaaccaggcgcattgtcgagcccagtccatagtatcgaaccgagcaccagttcgccaccagcgacggatccaagttgccagtccttcatggcatgcgcgaatccgatgtgctaaagctggaacaagcagctgctttagctcatcatctgtccgagttgcgactagtcccgccacaagtgctccgcctgatgtgccagttatgatttctgggaggacatcattatccagcagcgctcttaccaccccgaagtggtagtaagcgaatgtagcaccacccgaaagacaaagagcggtgcgtccaaagtttgtatcgaggtgtttgaaaagctcatacttggcatccttgtcaatctgtttgttgtccaaaatgatctgtatgcatgcgtgcacctcgtcgatgtattcctgaaccagctcctttgttcccgagtatgtctcgctatatattcgaggattttccacaccggaaaagttgttcttgacgcaagcctctaaaagtgcttgaagatcttcaatagcaggtacctcgctagagccgacccgaccattctccatttcccattccaccttcttcctcagctgcttcagctgcgataccaccttgttgacagtgaggtggtcgtaataagcgtattcgtctgtctttttccacttttcggttccaagatggacgtccaatgcttgagccgctttcagccagtccggatagtttttctgtgcagatagttcctgacgcagcctttgccttttcccccgccatgtcacccactgctcatacaatactatgtagacacgcaccagagcatagccaaagctcagtactatgagccacgcgaatacaatgaacaggaagggccatttcaaaacagaatatagcacgccttccctcgtttcatccttgcttcgctttggtgttttgcggcggccacgattcttgcggactcgttgattgattgggcgccagtcgttgatggctgtcaatggggaggcttctggggcattcagcgccttctcgaatcggtcgagttcatctggctgaatgaagtcgcggtcgtagtcagggagacaggccggatcgtaagggtcgtacacagcaggtttcttcttagtggtcatgttcaacacattctgaatacaccaacgaagattttgagggttacaaaggtacctggaaagctggggaagctacgttgtacgatcatgacgttggcgtcacgtgtagtttacctccacattgcggctagtgtgtttccggaaatagctagtctggttttctatttgctgagtcatccggatcctgccccgccagataagaaagaaaaaacacaactacaagaaccatccggtagctaaagagcaattgcttcgaattcagaagtctgttgctcttgcagaaatgagggaattatgtagatccactagaagcaatctcttcaatattaactttgtcacagtcacgcaatttacaacctcgctcgacattctttgtatcgagagtgaattaactttgagaaactatggcaggcatcatcccaccttgacatgctgcggcatttcaggacgacaatgccgccgcccgtgcgatgtcattgaaaaaaaattgtcggaatgtacccctccatgtacctcaccagcaagaaatcgacatccctccatgcgatctcttattcaatggtccaatgcgcaattagcggggtcgtcgtgctcgcctcccgagaccaaatgcgagatttcttttgttcccactcaaaggattatactacagctcaccgctacatggtgggcggcgcgaatatctagaattatattgccggcccgtgattggtaggcgtctcggaagagtttgtttgtcgcagccgaattggaggtctaggaaagcatcatgggctatcagcgggggtgaacattactgtagccatatgcataaagtactaggaagtgctttgtgctcgcggtatcggacatcaggtaccgagtagtagatcggaatgttagccacctttttatattatacagggaagcgtcatttcggtcacctgatgtaaaaatgaccccttatatatcgaggatgttttgcagcaactaaatatccttagcgtcgtcataggctgcagctgtccataattagattcgtttaggggcggttattccggacaattttccctcttggccatgttcgtcttccatgctgatcacaacctgctaaattcgtgaatgcaaatggtaaaatgcaatatgttgcgagtcatgggtacttattgctactttgcgattctacaccgtacactcgcttatactagcgagttctaagcatcatttttgatgtgtagccttcggcttgtcttgtaatgatacacaacgggaagaatatttattgtcccgtgttgcgcggtaaccgctcagtttattgtgttgctttaaccttttgtggtatccctgaacgtgccgggcgcgccgagttggagtgcggactcatgtcagggttaccctgttctcttgagagccttggcattttttggtatcttcaatctaaactcgaacccatcattccccatttggccctatgcagatcatggatcttccctcgcgaagtgttgtggcgttgtaggagccggtgagaaagcttttccccgcttacaaatttaaccccagtaactcctttccgaaaatgagcggcaaccgcagaagagaccaagctcagtgagccacattcgggtcttggcaagggaatgatgcgtatgccaatgacccgagccgtgtcaagccaatgaacagcatatcgcactgcacacttggcggggatcgtccaagggtggggaaaactgtccctcggatctccgaggccgggcaacgcccgaaatactcgaggccaacttacagtaggtagcgtttgttgttatgatgatgatgtctacggtacggagtcaacatactgaatatatacatacaatattgggtacacacagaggggcaatgtagatcgatccgacgtcatgtgccccctcttggttatgtaaaaggtatcagttcaatgtgttcaaacgtttatggggtttgaaaagactagcgtcttattttgtttcaagacatacttctggaaataacagggggttgtccatattatgccgcacatacaaagtacatatgcgcttcatagcacacacttcgataatggcagggatgctgtagactcctcgcatgaaaagtgcagtgtcgtatgcagcaaggctgggatctgaagttgaaccgagcgtttgcggcgcatttacataaatgccctggaatgttaagttaactagctctgaatattttgatctaactacaattataccccgcgctctaggatctgtcgcagggattaaaaaataaaatcagccatggcaattactgtgtccaaagtctttgaagacgcattttgttcttgatgctcaaatatgaaacattagcaatataaactgatgtcaaccacaactattctaggggtcaacggtcaacacccccctcatagagataaaatacatagagagatgaaggggtaacatcgaaccgtgggttgacgcccttatccgttttctatagaagcggtgtggctgatatcgggacggagtcgagtcaaaccatgggtcagatgaaaccatatctacatctcggtaacactaatgactcgtacggtatatgttgcagttgatgtcatctggagtatatatttaaagtaaaccaagccattttatatttccgattcccagcgtctccactcatcgagaggaatgtcagatgtcagtgcgagctgacggactcggacgatcgcagatagcgtaattgcgaattctagggttgaatgtcgctgattcgtcctttgacgggaaaatcaccaaggtatagcaccaaccaggtcctctgttgatgctcattctcgccgcattcactaaatggctacatccactatttcccctttaaggagaaaaggcatcctgcgagcatgcagttatcctcccatgcatgtgcgcccccgccaatcgtgtgcctcgtgcgatcatttgcttccttctcaaccctgattcgatcgcatgcacccccttcagcacctacaggtgaccaactacatattcggtaagggcacagcctatgagtcgtcctctcgtactctcgtactctcggggtttgcgctgaagagtcagaatggcccaaaaaaatagatgatactccatatggagtagatgagccggtaaaaaaaagtagaaaagcgggccaacagaagcacagggcaactaggccagttctcggcattcccacccggtctgcatcgtggactcaggttgcctgcgtgtggctgcgtcggagattgatcaacacgccgccaccgagatgggactcatgacaactttcaacagttcctaggaggggtgggtttcaactgcatgaatgggaagacgttaaatttttttttacgtcgatcaaagagaggcccctctgtgctccgtacaggacccaccgatagcatatggtctgagtttccttgctccacgatcggctcataatgtactccgtagactcaatcatgtaagaggaatcgaaccatcacggactaatatttgctcactattgagaaaaaaatttcggctgctgcttatagggtaatatgggggcttaacagggtaatcgttgactccaatcgtttcgatagacgcgggagagaagtcggcgaactaaattcctaggcgcagtccccataggcttgccacttcccacccgggtatagtagctgcattagtggcagagacttattcatattagtgatggttatacggtattattagactaagtacggagtatggaccactccgtagtctgtgtcttatagattacttggataggtcaaatttgggggaagaggacacatgtagggaagacgaggcagaatcggacaattgcattcataaaagcataagataataaaagatccaaagtagaaaccgaaatctctcggaagtatatcagacgactatcaggagaatatgctctcagctgataaaagaaagtggaaatcaatgtttccaaggttgtaaacgtgtattacgggcgtatatgcttgtgtattgtgttatcaggataaggcgtattattttagctaaataattggttaccccgtgccaccaccttttccctcttcaccttttgtcattcctctccaatctctatctcacttttcgaggtctcagagaggagatcgagtcgttctttgacactccatattcatttctcccaggtatcattcctcctccctcacctgcctcccggcgtccccgaaatccccaatgagactggtcaatctcagcacaccgttgctaaccttcgcattcagagcctcgattgctcgctttttttttgggtctcacttgggtcgcacaagcaagatgtcgactacatctagcaacctttgttgagccatctatcttcagagttctcccggtccatcaccataccccccgcccccgttgacgccatggagaaaatcaacaccggggatggacaacttttcatcaaggtttgtgttcctatgcagctgtcgcctgatcattgcgatgaccagagatcgtctgagtgcttggtccgatagacagctgacgcgcatggttgctatagaatgtcgctagctacgttcgcacacacgagaaggccctcgccaatgcactacagctccgtcgccagcccacaaaaaatgtcattccccaatcgcccagtgtacctttgacccctggtagctctttcgcctcgacttcgtcaacactggctgcggccttttcatccgcagcattgaaattcatgtcgcagaacgccaaaaccgccaaactcacattgactccccaccaccttttctaccttctctcccgttttgaagaattgaccattgccgttggtcctatgaacatcaggctggaaaacattcacaccggggtttcgcaatcctatgtttcattcctgaacaagccccaacagtctcggggcgatcgggcctccatccattcggtgtccagtgtccgcagtgtgatgtctggtatgacggacctgtggtcatctttccgcatcggatccaaggataccccgacgaagtcggacagggccaaggccgctttggaaatggacttgaagtatttatactctgcctttaccaagatcccgtgtcttcgtcttgcccctgaccaccgtgctcctcttatctctggatatgaagaatttccttttgatacggctgtgccgctgcattccttcaagaatttgagcgctttagagattattgatttagactaccgttctttctatggctgggacagattgtctgagcaactacgcactttgactatcaagagaggtcacctggatgatccggctgatcttttaacgagaattgtgttggacgacattgacaaacgccgccgtcggtctgctaagtcccaacagtcgccttcactaggatgggccagttccagcagtcagccgtttcacactcccgaccaggccaattccatgtcagcccctggatctcctatcgcggacacagcattcggaactagcactagtcccagatctgccccgatgctcagagctggctcggaaggcaccaaaattcgccccagggccgggagcgtctctccaactcggcctacgacaaagcacagccaccgtcgaggccagtctcggcaaattcgccgcacgggctctgcaagctctgaatcaagcgagacctctaacagccatcgaaatggaagctctacaaaccttctcacagacatcctcccgccttcaaaatggcgattcctacgacacctgggccttccggaaaattccctgacatccgtgtctgctgccagtcttgcccctgtagccaacagtctcaattcgctcgatctgtcctccaacctcttggcggagattcccgacggtgtggcatcgctggtggcgttgagagccctcaacttgtcgcattgcatgatcgagtctcttcactcactcacccgaaatcctcttcccgccatcaccgttctcaccctccgcggaaatcgcctccgttcgctcgcaggcattgagaggttgctttctttggaaagattagatctccgcgacaataacctcacggacccgactgaaattgcacgactaaccagtcttcctgaaatacgcgagatctgggtatctggcaatccgtttgtcaagactcactccggatatcgagttgtgatcatgaacctcttccgccgcacgcctggttattccgaggacatcataattgacggtagaggtccgggatacaccgagaggaagcaactggtggagcgagttgcagagcctcaagctgcaccgattgtacgctccagcccggcggatgaatcaacggtcgtacagaagtctactatctcgaaagtgccccacgatcttgcaatctttaagccccaagaagacgagcgagatttgcacattaatggcacacagctgaaggaaagtgacgggggaaccaaccgtcgcaagaagctccagcgacgtaggatagtcgatatctcaacagacaacccgtttaccaccgatggtctgggcaattccggaagcctggctctcccggctcttccggttcagcaaattcaaccgccagttgaccgtccgaccgttgtccctgttgatcagtcatggaggctggacagcgctacgcaatccgggtcatcaagcatccgaagccccggaaagcccatgcattcgccgagtcctcctcttctacaggctttgcagggtaaggacaggacaatggatgaagagttttgccgtcagcagctggaagttctacgtcaggacgtgggccataaatggttaactgttcttggcgagaatgactgggataattcccgtaaggacttcgctcacagctctggggcgggcctggaccattcccctcacatttccccaccttcactcacccgctcgaatacccaagggatattgagcggaaatgcgcttagcggataagatacgctttttttttacagtcctcttttgccgggactccgtttgcctctcacgtttccgtttcatgacccccggagtctcttcgtcgtgggtgcgacgtttacctgcttcagcaggtttttttcatctcttttcctcttatttacgaggacacaacttccctcgtacggtcccccgggactcatttgaacaacatattttcagcatcagcagctgatcattctatgcattgttttcggcgttggacgacttatgagacatggtgggttggatgtatgaactatttacggccgtctttgctttccttttcactgtttcatgtctctattcccttttcccaaaacgcatcctgcgatggcccttgtttttgggggtcatctcgatccacggaaggcacagtgaaagacatctttttttcgattctagcgttgtactgtatgattctgaatttcgggcatgttggcgttggaaggatctttgacttgtattcccctcttgttacttcttggtttttcccttgttttcaattccttctgtgtgaagctgcatgacttctggagtagcattgtatgagactagagcttggagctcagagctcacagctcatttgagaaaaaaacgccaattattttggaggtctacttttctactaagcatgtagatatccattctatagagtagaggatccaatcgacacacaaaaggcattagctctcagtctagatgcgctatccaaactatataattggactattttagttagatcagcctattatttcgtgcttagaccccgtttggcgtcgagggcgttatgagtcgagacctagaatccaccctccccctctatgcaaattttttgcatcgtcaaagcgcttcttgtaacacggaaaagatataatagaattaatagaataatcgaatggtcggatgaaagtagaagggggggggagttcctttataagcgctctatatataacaatatcacccccctctctctccccttgaagatcaaacacgcgcaaacacaaaataggaacttcccgctttcttcgtagaaaagattctcttctcttcaacattcaacctcatctcgatcacgttcacgttcacgttcacgttgctttgaaagagtcaaactggtctgactattatacacccgagaaaattttctcccttgattgaaatttgccttccctcggaaccccatactcatctcggttcatctcgatccatctcgactcatccaccctccgacttctttcatcccaagtcaaatcgataagagctcagtgctctttcgctcagcctcgtttatcttgtgaggcgtctaggagctcattctcttctccctctattgtgcgcgtacacaacaactcggataggcaccaccgtccacacccgtctggcatctccgccagaactggttttttttcttctttttgccgtggccgttggggcccttctctagatctgtttggtcttgcaatcttctgtttggtaggcatctattccatttccctccgctgctgcttctcccaacacctccgaccgccaaagggggagaaaatccagcgaaaattttcgagcgcgctcgtcaatttcgcttcaccttgggacttggaatacagactagacttcatctcaatctgcgacgctttattaacttgtttttccaatagtaacaggacatagccgccgcgtcatcaaatctctgttattctcacccgatcgctccggaagtctctcttccaccattcgcttctctttttcttccacccattttttcttctttctttcgtgttttcgttagacattattcaccatggccgatcaggaagtggatctggactcgattatcgaccggctcctggaggtgaggggtagccgccctggaaagcaggttcagctgctcgagtcagagatccgtttcctctgcaccaaagctcgcgagatcttcatctcccagcctattcttctcgaactagaagcgcccatcaaggtaagctgtctttttgtgtccgaatcgttcctcggaatcagcctccgtctaacatgcgtgtctcgctagatttgcggtgatatccacggccaatactatgacctactgcgtctcttcgaatacggtggtttccctccggaggctaattacctcttcctcggcgactacgtcgaccgtggcaagcagtccctcgagaccatctgcctccttcttgcatacaagattaagtaccccgagaacttcttcattttgcgtggaaaccacgagtgtgcctcgatcaaccgtatctacggtttctacgatgagtgcaagcgccgatacaacatcaagctctggaagactttcaccgactgcttcaactgcctccccattgccgccatcattgacgagaagatctttaccatgcacggtggtttgagtcccgacctcaactcgatggagcaaattcgccgtgtcatgcgccccacggatgtaagtttctcccctcccctctggtgtaggtggttctattggcagcgaaaataaaagtggcagtgtggcgctgggttcgtttggctgaagcccaacatcgctgactgaaatagattcccgactgcggtctcctgtgcgatctcctgtggtccgaccccgataaggatatcaccggctggagcgaaaacgaccgaggtgtctcattcacattcggccccgatgtcgtctcgcgcttccttcaaaaacacgatatggatctgatctgccgtgcacaccaagttgttgaggatgggtacgaattcttctccaagcgccagctggttacactattcagcgcgcccaactactgtggtgaattcgataatgccggtgcaatgatgagcgtggatgagagtctgctctgctctttccaggtgagttattcaatttttatccccgagattgtttctaattagttcctaacctgctctttttttccttccgatagattctgaaaccagccgagaaaaagcaaaagtacgtttacggtggcatgagcgccggcggtcccgtcactcctccgcgaaagcaaaagaagaaataaaagaatcaatacgagcttccccatctgcagcaggttcgggcggagataagcctttcacaaatctctttaacagcgccctcatgacatcctccctacaccccccgcgagtcccacccccggatccacgaaaacgatgaacgaccgaggaaaccctcatccgcacccagggcagcccgatattcctcttcaactcccgcaacgataatatcagtcacattctcaaccctccagaccccccgggctctctctctcccagtgcgacatgcgataaaaacacaacagtcaccccatcatttcctggcccgtgcgaccctctgtacttccggagcggagttcaaatgcttatttcttcgttgtttctcgacttctctgtctctgtttctaaccatctggactggaatgtttttcctttcggcatcctgggaatggggaagggaaactggttatcttttctcttttctttctctttttcttactttttattgtcctgttccttgaccgcatgtgttgttgttttcttatcgaatcctattcgtctttcgacccgtcttctagtccgacacgtacgaggcgctagtagtacctttctctgctgatgcatcgtataccggatttggaatgggtgtctgttactagcggtgttttgtgaatctagctcgaccttagaatagtttcttcggagatctagattgtatgttatacgggctgcaacgattacaattgaggttattaggctatgatatctatcattttcggatagttaaatctgtcctggcattgatactctaactaatacattcatactccaatcaaggaattggaatatgtaaatacttcgtacatgtagtatgtgaccatacatacctgaagtattctatgtagagagctagcaatagcaataatagcaatcaatatcactatcactatcagtatcaggattcagtgcacactcctatgtttgtaccaagaaagaagaactaaattcaagtctttagactatagtaactaggaaaaaccagctagctagctcgagcaaaagcggagaacaaaaggagcaagaattgaacaaacgtgacaagatcaggtacagcgtagtcgagtgacacattcaagacgtacaagtacgtccggggtaaaacgttggattgggtttgtgggaggggggtgggtagcatagctagatatgggatgttcgggtgtagaggaatgtcggaagaagccaaagccatttctttcacttggacacttggccgagtggaatgatatggatttgaggttgacagattgaggaaggtgatcagttgtcaggagaacagggaggaactctgtttaaacgtattgggacaaccatctgattccctcgccgtatcctgtcggggaaaagataaaggttagttatgattgtttcaatgtctgcttagccagcacggctccagttttcactgttgggactggacgaaactcaccctgtcgcataacaacactgcacatgaacacctcgatagggcggataccctcgagagggaccttgcccttaccagtggtctggtagagaccgagctggtggcgcagctcatcctcgctgacagcatcggggtgatcgatcttgtttccaagaacgaggaagggaaccttggagagctcctccatggcgagaagagcgtcgagctcagccttggattcggggaagcgctcgtaatccttggcgtcaaccaggaagacgattccgctcacttcggggaagtagtccttccagagacggcgagctgaggggaaaggtaggtccgttagttatgttcagtcccatgattcattgtggggggtttcgtgttgcttagcagtatgcttgcgcaacatcagaattccccatcaagagcattactcaccctgctggtgaccaccgagatcgaaagtcgtgaagcggttgttaccgatagccaactcctctgaggttgggtgtgcggtaggttgcaggacggcgacacggtcgttctgttgaatgtcctgtcagcaaacgagccccacacaacgtccagttcttatatcatctctcccgtgctatatccaagctccctgatctgtacagaaatccagcgccaccagactcgggacctgtagccagcggaattgaacaccaaaggactagatcttctcttcccaaactcaacaccaacgctcaactcaccttcaacatgtgcagcagcgtcgtttttccggcattatccagaccgaggaacagaagcttggcgtgcttattgaggagacccagcgaggccaagatatcgtaaactataggggaaagaagcgaaatcagcaaattgcaccttgcacctaaagacgcacgcctcgatcacaagcagccggtaccgcggcacagccgtcgcatgactcgacatcagagttggaatgaagacatgcttagctccagtgcagctgcactgtccggggaggtatctcgttcactcttcccctgtgttcgagatcggccccggacgtcggtgactgcaggtgatcgggagtggtatcgggagggtacttacaccagttaacgatccacatggtgaagggccggagtcagaaattattgggaaagagggtgacgagcggggatcacagattaagatcagtaacaagctgattggggggatgtggatggacggggtggaagagatagaagcaaagaagacaggtttgatgttgttttcggggattggattggtgccttaggcaggaagacggaatcctcgcgcggcggtgacagcgataggctacgacttcagggattcgggctgatttgggtatatacggatgggtttgtaaattctctgtgatttgtttggggatattgatcataattgcgtacttctctctgaaccttcgccgtggcgaagacccgccactactcgatcttgttggtagtattactgttatcatccaccttaggagagaagaaggttcatctaaaatatatttcatattcactcccatcaaactgatggatctctttattcacaatgcagaaaagccagataggggtatatgcaccgcagccatgcaagacaacaaaggaagcgacctccagcaagtcccaaggaacgcagtaagggagaagagggaaaagaatatagatagacttccgacagaaaatgtaaagaaagaaccacctccgtgtaggaattattgaagagaagggggaaaggggtaagggtaaagaagccattcatgtggataacacgaagtcggcgaatatgtgtaagaaagcgaaaggcacggatcgctaaccgagcaggataacacaaaaaagaccctcgaaaccagaaggtcccgaaaaagtaggtatgtacaggtcaaaaaaaaaaaaaaaaaacggaggtgtgaaacttttcatacaagttctatgggtagggacacctaaacggataggacgagctgggcgtcttgagcgacgccgtaagctctgcacctctcagcaacttcgaggccaagctccttcatccgttcggctccatggcctggaataggccgtttgcccatctgctctttggcagctttgcggcagtgttgacgccagaacttttctttgcgtttctggcgcttcttctcgagcccttcgacaatgtcgattgggccacgagtgtgtagctcacgggtacgtgagtgttcatgctctggggactcagagaatggtggaataccttgccatcggtgatctttgtctagaccggcgaagaaagggttggggacacggggaagtgacttggtacggacgagaggccggcgctggaccaggtggctgatgttgacacctccggcagactcaacgatgggcatatcctcggtgagttcccatgtagctggggtgggcgacttcgctctcataggtggggccggggacttgagacgcttcggagagatgcggccagcgcgagggggtggcggggacatcagacgtctgggagagcggaggggtgattgcttgcgggcctcgccctctggccgtcctcgggtaatttcctcgcggtctcctttggaggataagctggagagctcttcctcgggttcgaggtcttcattgtcttccggatcgcttgtggggaagctggggtcgatatcctgcgggatgataatttgtttgagacggcgccgttcttcgaggcaagatttgtaggcaagttcgaggggacgatcctcatcgagagttccacagacaaagtcggtactatcaggaaggttcggggtcctcggacgaatcctaatgttcttggagcccttcgaagtgcgacggccaccgatcctttgtacaggggctggaagccagttcaagtgatcgtccgtcatggagtcgaaagatgtgttggaggcccggcgttccatggttgagggacgagcatcgatgggtgaactggttggttttgggacacggtgtgatgatccccaaaactcgatatccgagccatcatcgtcgctctcgtccgactccgcgaagccagcctcgttgtccgattcattgccgtcgtctgaagagaagtcgtgcacagtctcgtcgtcgtccggaaggtcttccatatcctcttcttcatccaaagcctcttcttccgcctgttcgccgagccgtcggatggccatttctttcttcatgcagtcgtccaaagtgatcttttgtgtatagtcggcctccctgttcacccattcatcatcttcctccgtagagctagcaaactcgtggaaccgggtggcttcggattcctcgaacttgcccagtccactggtggggatacccttgcgctctgtagacgcagagacagcctccttagaaagctctttgggggtttcttttaatttgggagaggctctgcgagcaagaggtgcaggggaaccgcggtatcgcggccggagggagggcttgcgcgccggggatcgctctctctgggaaacagtctcccgtccagggcacgcgaaagtaagtgtagttctgcgcttgaggacttgaatcgagacgtcttccgtgggaagctcgttcggtgcttgggctttgggtgggagttcttgtgacccagagggtgagacgggagatcccagctcattcttctcatcagtcttacgaccacaagcgaagctaatgcatcgtttgcggccaaggttggcctcgacggaagtttcactggcatcaacgacgttcactttgggagtcaaattcttctttccaatcaaagcagcatttttcatcatctgtggtaaaggtgggctgggagtgttagagaaagatggactcgtgaggtcgccgtcgctggtcaactcggctgttgagacgccactgaggttgctgtgataggatcggtacatgtaggagtcgtagtgggaggtgcgaggatcggttggggacatctccgggctgctcttcaatgcgcgcgtgagcagtgattctttgcggttcgttggccgagaaagcacgatctgatcggagttcatcgaagtagcgtgcataacgtgttcagggggttcgtcgacgtcctcggccaagtcggcctcgccgtggaccggcttgctggacgagttgggcgagatgagcatcttcaataggttgtgaaaagagaaggttctttctctgtcgcgagactgtgccatggtttcggaaggtcaaaaagaaaaagtgttcacggtatagttctcaggtagagcaaggaggatgtgggtgaggcgagtggcgtaggatcgagttgaaggcgaggtgaggatgttgcttgaaagatatactgaggtctttcatgcaacaaatgctgtccttgataataatcgatcaatgttaaatcgatcgaccttgagggcagaacaagatgtcccgagcgaggactagtgtcatgatataaaccgcatgactagggggtttcgagacgaaggagggtattcgccaagatcgataattgtccctaagaatggccaactcaatgctgagggagactagatctgattctcgaatacctccaggatttgaaggtccgtgctttcggagggatctcgatcaagaagaaaaagcaaagtcaggaatgtcgagaatggcaagaaatggaatggagtggagattataaagagtaaagaggaataaaaaagaaggggaagttcggggaaaggtcgacaataaaaacagaataagaagatctcgcatagaaaaggtgcaggggtctctccgatgtcctgggggggaagagagagtgtgggagtgacgatacggcaacccggcacggccgctttgggactagcggcgtttcccttttgaaattttatttctttcttttcccacgttttttattttttcaaattttcaatttccgcggtttttgtgtaattttggcttggtctagccggtttgggatttattcttttctttttcttctctttccccccattgacccccccagtgaccccccattttcccaaattgccttggttagaatgtccggagtagggctggagactccaggggccgtagcactttctgactaagaaaagctggaaatgtgtcctgcgactagacattggttcctgcgctacttgtaccgtaccatggattgtatttctatagatattccgtgtctttatttcggattcttattttatttcgtttctatttctatttctttatctcgatttcatatatatctacaaataaatacatcaacggtttcaccttcaagatcgaggtcaattgattcaagtggaccacgatgaccattgtctgttcagcgctggctatgagggattttgtgctgagactaaacccgtttcaggctcttccttggaaactccccaagctgcgacctctaagattattacttgccgtggccgtccgaatccacttgccaacacaatcaaatcctggtaccgagtactgaagaagaaaaaaatcgccttgatatcttcaccgtatattgtagtgctatgttgtacatcggagaccctcggtaatttttccattgcgtatgcgtatggtcatcttccacttacagaggccattctcatagtgcaacccggtatgaaaaagaaatatttccatccactcgcagattgtgcctgaacgctaagccgtcaaccttggccgcatttgccctagagctaacaggttgaattctcttactcgaccgaaactcgtaataaggaaatgatagctgaaagtataaacgcgctgcacacgcttgtctacatgctcttggcgggtttcgctgagttctcgagtcatatatctgaatgcttcatgttgatttcttaatgcggatgactccttcatctgacgtagcatccgcgggtgacatggaatattagtcatttactcttcctccatcctcattccttccttgtagcctcacaccacttcaatcctccgatgacctaactccggagcttcgcggatagaggaggcttgggaaattggatgttgcatatcgtacaatatacaacatactactccgtatataccttacaggttgtgcacataggtatccatatgtactccgtatacggagtacatatggatacctatgtgcacaacctgtaaggtatatacggagtagtatgttgtatattgtacgatatgcaacatccaatttcccaagcctcctctatccgcgaagctccggagttaggtcatcggaggattgaagtggtgtgaggctacaagacacagagtcgtatccactggactcctaactgtacctcaaaagaaactcttggctctgcttcctcccggtagatcagtcttggtatacatgctgtacatccagtaatttgtagatagaattgattattcccattggctctcatccagtggcaagtcccaaggcagtcctattttctagggatgtccactcagcccttcgccagcacggcctcgttcgacttcgtcattccgaggcgaagcgatttggatcatctagttgggcatacaatcgatctacaatacatctcgcggagtacaatgttgttttcggcagctttgtttatcgtcatccatctccacacaaatcaccgagaccagaaaggaaaatccctctccatgcccgatgacagacatgcacgagcaacctgcattatgttgtaaaggcttacgaagactcttacattaacaaagaacagcggtcagccgcgatcaagatctgccctagatcggctgaccgggcaagatcttccctgcgcaaaccgcaatcgcaaaccagtctccaaagtatatcgcataactcggacaataaaaaaactcccgccgaaagagaagaaaatcttgcaaactccaccagtcaccaaaaagatcaccgatgctgacattcacactggttcccggaggtatgcatactgcagccacaaccccccattcaacctgtagggttatgaacctctgtttagatcgcgacaagcttctcgaatgggaggagatccccccacagtccatctgttcgaacaggcatacccctgtaaatgcaatccaagctcactgcattgcatatcctcgagccgggtgaccgtgggaaatgagttgagtttggaatcgaattatggaagaagcttgttagcaaggcaacggctttgcgacagggattggcctggttcgaagctattgaattcatctagcagttttccctatattaggtttttattctttactccttcttcctactagtgtacttttttttacgtacacaggacaaggacacaaggacgattgtctatgtacagccgagcgatcttcctcaaagaacgattcactgtatttttagtatttttccctcttcttcccaatacggagaaggcagccggggcgcaaaacaccgtttcgaaaatatacatcgtattcgaaattatccaaggatacaagccgcttcctacctcctccgtttacaggacaaaagttcccgcactgacggcaataacgcagacgggaatataaaatttcttggccacccccatcagtccttggacttggacttgggttcccgcaaaaacgggaatgggaaattaaaatgagatctaatcctgagcggcattgcggatattgtggaatggaccaagaaagacccctctctcccgatccctcggagacgttctcccaagtggagtaggggaatatttgtgggacgggatgttctatacgatgagaatatggtttgatgtcaatggctactagtagtagcgctgtgttcgtggcacgatgggatcgcagtggcaatttctccgggcaaaattatcgtggcggccattcaattgacgagtcgcaatctgacacgctctttattacttaccccaagtcttgggtgtaagtaaacgaaggaatagtacgtgtgcccagcgcaataaggtgtgaactgtgcaggtggggatacggactccggacaaaggatggcacgagcgggatctttatttgacgcttagaacgtatcctcctcttagaaccccaaagtgaagcgcaagtgtatcataatagaataccagaatgggttgaccgggaacacaaccggggaagtggagttgttgagaagtaaagagattggatagctgcaagctgcaatgcatgcgcgataggcgggacgggtaaatgggttggaattaatccgagcatttggttagtacggaatacagctgtgtatgaggcattttcatattcctccaccttttgaactactgcactgcgccagatgcagttgcgtacttaagccctgttggcgttctgcgaattgactttgggtattcctgtgaatcctgtctcagacatatccatgttcttccaattgacttcaatcactatcccaataggctattcgcctttcgttctaccataccggaatgtcactgcgatcttggcagatgggcatttttcccgaggacaaagatattgcccgacatgtttcactcgcgcaaagagccatacaccactaatagactaatcgttggtctgtgcaggatgtctcaataccccagatcttcgccacatcaaagaatcaactgccgagtcggactcggatggccaatgccaatgccaagtccaccccgtgcctcataccgcgaacaccgttccattgagcagatctcccccgaacgtcacagcctgaacatcaacctcatgacctccccgccaagatagacctgagggttcacaaagtcatgctcggcaagacaggtggaacgggcagatcactgatccacccagcagtgtacagtgcaaggagatggtcagtcgctctaggccgcaccggaggaatgcttggcgacggcgcgtggtgaagcaatctgccaagatctaggcattggatcttcagaatgcgcccggtacgacgtgagctgtggtatggagccgtgctgaagaacaatgggtatttccggggcgacaatacggggtagaaagagcaagggaggagagggaagataattatgccgagtctccataaagggggttcaggttgaatgattctatttcaatacatgatgcaccccctttcttgaagagatcttggcattgaaaccccttggataaccatctgctccgtgataggattccctcgctgccaagcactgtgctacatatagcgaattctcaaaaaaggactcgttgacgcttggtctcggtagtgcggctattgaatgcaatgtatggggaatggcctcgccaagggcgatcatggtgatcatgccgacacatgagcgtgcatgaatacagtgtcttggcaccgtcttgattatttacgtgctattgtttgtgccaagcggtcgcgcggtcgcaccgagtgacaataatgcgttgagttagggggttgcagtggcagtgctgtgctattttctctcgggatcgacgggctacaggcttggccgtttgactcgttctggttcgattgagattcgcagcttgagcgtcggaagcctatctatggactgcctattacctgactattgaggtgtctagtacggagtatgctggcatagattttcccatgtacaatgaacatggtacctatatatagttagatgtaaggagcacgatgttatatgtacacttcaccgttgagaataggatacgatcgacactggtgttccttcacctcttctattacgaagtatatgttgtagacatacatacgaagtatccaaaaacctgcgtggataaatatagcaacctctcatagcaccgacgccaccttgccaatatcgcggctcttgtcatggctataagccttcatccctgcgaagccacgtcagatgcgcccgaactcttcaaactcctaggcaccagaatactgacccccgacatttctgacatttcaattccgacgtacaatgaatgtatcgccactgttcaacgcaaatcttctggaagcccccgcccatggacctctagagactagaacgtggttggctctcacgtttgatcatcgggtgcgaaatcgacttgccaatgaccgtttcaactgggaggtacatgggaatcccgtgttccaaaacacggcatcggacaccggagaattgatccttgagcaagtccacagaccgcagaacagagagacgaattttgaacggtcgcatctaggtactttctagcccctaagatgaccatctgacagcccccggtatcatgtctacagctaaatgcgcatgacacggcgatgattattggtacttttctatatctccctatgatatactccgcaggcggcatgatattattttcaatagggcgccgagcttgacaggctgaaacacgtttcgggtatcgcccagcgaagcagcaacatcgaattcagaaccagaaccaaaccaacagcattatccaatataccgcgtacagagtaccgagtacaagcagtgtacatgtacattgtataattgattacaaaagaaacaggtgccaattcgagcagtttcaaccgttgtccatcgcaataaccccaaccacaaagcatccaaccacggaaggatccatcgatgatcaccgaaagagggagaagtgcgcgctatcagcgggagttgttgcgagcgacaacagcccgacctacgtaatcgcgcaagaacctacaatattaccgatccctcattcgctcgatcgccagccaatccccggccgatatgacgccgttttgatctagggcgctttgaaggcgattcgagcgggttcgataatacatgttgccggattaaccggtctgtggatctgccaatgatttgatatcatatcagcgatgcgctgtgatgtaccatgggtttgaaaatgggggcttgagcttctaacctacttccaacgtacaatatacgtttcagatgggtcatttgaccttctgaactggtgacatcacggatggagaagggcatggcacgatggctgaacgcgtggctggttactatggtagggtggcttttatcgtggcgtacactagcgatgcggtactttccgagatggttctccatctctactgtacgtcagtgcttgccctatacgatggacgacgttgggcttctaggatacaacataacgatcatagatggccgtgcgatgagattgtacatgttcattagtaagataatgtgggtttcatttattgttgatcttcggagatctatattgaggcagctatgagatatctcatcaatggaattataagacatgatggtgacgctcttgatgttcaatatctgattaatatgtctagactgctttcttctgattcagtatcctagcatatagtaaatttctctagcaccattcgagtcattatccatatgtcaaacctgctctgtcgatttgatactacacaacacgagtcaccggtttccttcgacctccggataattggattccatgtctgaatggaatttctgtttgaaatgttaatttgcatcagtaccatacagaaatatcttgtcttgcttttgccgctgtcgcttcttgtatcccagccagcagtatttcaccgtccatttaccagtatacggcacaaaataacatattaagacactttcacagaagttagggcatacaaagagatgagtcgggtggaattcagcggatattttttggtagttcgtgacttctatgactcctacctaaggcggaaagtggaccttcttcgatcatcgccgagcctcagactccgttggatattccatcacaagatttaatgtatatatactgacaaaatgattcagtagaaacctgtcgggtaatttggatagattgaatagagaaaatggcggctgaaagataatcccgccacatccaacttccaagcttatcctctgatgcctattcttcccctcaatacgagctgaaatttcttactttcttctatctctaacaactttcaatatttctaagcaatggaatctaacccaacatcctctcgctcatttgccgcttcttatgtatccaactcccgcttccatcgctccttcaccatcgaaccaactcctgctcatggccctctcaatgtgacttacggtgattacggccgcgagcccgatgagaatggaactactccgacacttctctttataccgggcatgttttcatcgcggtacatcggtatttgtctacacgcgattgccgataaatgcggcgtccgcgttttggttgttgatcggtaggtgtaccagcccttttatataacatgaactaaggtcaacttgtatatagtcccggaatggggaattccactgacgtgccgctcgcgcagcgaatgtcaacctggattgagaccgtcccacggcttttggcccatctagacatccagcatgtttcgttggcgtcgcacagtgctggcactatgtatctgttcaacaccctgtatcactgtcgggatatcctatatcccgagaaaccgatggctaccgttctaggtatgttaaatttcctgcagataattctgtcctttttgtatatattgttcatattggacggctatattccaacttcaaaggccgagatctaaccacatgacagcgccatttgttgaccccgccaaatctggcatgacatccttgaaaatagcccaatatatccccgccccagtcttcaagctctggcatcatatcccacgtctctttctcgccaatgatgggtctgcaacagcaacgagtggagaaatgattgccaaattctctgcctcctttccctcaaagagcggtgatgaccaggcaaagaacagtctgtacattgcgcagaactatggactagacatagaccagcagaaggagatagactctttgatgatgcagggtatgttcaaagaggacacggttggcgctaacagtgaggcgctacaatgtctacggaaggagcccaacacgtgggacaaatgtgaagactatgaggtctttgtgcgtgagttggtagagctcgaaagaggacgggaggggccgccactgaaagtccaggcattgtttgctgagtccgacagcatgagcggcaagaagggtcaagcctattttgagagatgctggcatcagatgaatgatggggactcagagggtgcaattgaatttgattcgagggtggtttctggcactgaccatgatagcttggtaccgtctgcggaagtgtgggagagcatcttcaagaaaatgcaacgagcggaagacaatatctaaatatggttcttgatatcattagctctacctgggctgccgtacgttcaggtatacatacatacatcgggggctaacgctccaatcattcattatggagctcatgcaaaggcttcagattgaagctgattgtctgtatcggctgctcacgcaacctctgtccataacgacgtaaaatttgaagaatctacgacccaatgtgatatctagacattatatataggatgtacgtgtttccagatgttcttcttatatatctttccactcgtatacatagacaaaaacaaaaacgtaaaccggacagatgatttttctatgtacaacaagggacaactcgtcacgagctgccgaaggctatcgacaatcctgcgctgatagaatatttagatatctagaaaagcgaggaagatacaccaagacgaaggctgtccagaaatagggccatgtgcagaaaaagttacagggactcgaacctgctatgtcttaggagagcccgagcggtatgattcggctgatcgcaatgactccagagaaaggaagaagaggcggaagatctcatttccattgtccagcatcttccgttccctgggcgacccgtttcgccccgttctcaagacctgaacttgcactaccgagcgcattcccaaccggctcgccagcactccccgtcgcgctgttgatagtatctccgagacctcgcccggcagttcctgtcactccacccactgtgcgggtgataccaccgactgtgtttccaagtgtggaggtgacaaatttggcagctccagtggcgcctttgtcttggttggattcgatcggcatgatgatgtgattgatttatggtagatttgagcgtgcttgcagaaattctggaatttcggaatggatgtaagaggataacaattatagaattatagattgtagtaatatggatcgaaagaaacaggtggcagaaggttgttatattaagcgcgcacgctatgacatcattgggtggcaggggtggcagtataggtttatgacttgtaagaatatcagggaatgagagggaaatgtggcgaggtttttcccaagtgtatgcgctcctgccctcgaaatcatacattatcttatccacatggcaggtacactccaacatgtatatcaacaagaacacgcatatgcgacctaggagaatgacttaggagcagcgtcagctccatcgtcttaaagccatggctggtctttcagtgattcctatcttgagcttagagtccgaaatccatcaataatatcagtctcgcggcctggcaagtgtgcggactggctcagcattctaaacaaatgagagctcatttatcttttcaagtgtgtgaataccgaccttccaaatggttgctttcgaattgtcctggacagattgatcacatcatcaattagttgctcggcgagctcagcgatagccttggtcttttaggcctcttgaggtctatcgcttttagatgcaggttcttgatcctgatgcactagacagaagacggacagcaaaccaatctccaaggtgacagcgattcgaccaaccgaaatagaggacatagaattagctcaacttgagcttaaagggtgaaacaacggatgttcttagaggttaagaggttaagagtactatatatgactgcctctgttggccgaagagagggatctcacgcatacacagaaatggcgagtaggatagtcagacaactgcttctgatgactaaatggaaatgtaattaactagttcaatcgatgtgtttcgagatgttcgatgatcaaaaacaacaaaatcgggaacaaaacgccctgcctgtcaaaacgcggtagggggnnnnnnnnnnnnnnnnnnnnnnnnnnnnnnnnnnnnnnnnnnnnnnnnnnnnnnnnnnnnnnnnnnnnnnnnnnnnnnnnnnnnnnnnnnnnnnnnnnnnnnnnnnnnnnnnnnnnnnnnnnnnnnnnnnnnnnnnnnnnnnnnnnnnnnnnnnnnnnnnnnnnnnnnnnnnnnnnnnnnnnnnnnnnnnnnnnnnnnnnnnnnnggttataatttcagaaataagacaaaggaattgtgaaaaatgtgaaagaaaaggcaaaaagagaaaacaaggccccttcagaggcgccgaatgcctcggcggccagaattatgttggctctggcgaacagacgatctctgactagcacgtttgcgtcgaggtgtttgttcggtccgctccatcagcttcacctgctctgtctgctctcgcagcctgcaggctttgacatcacgccaccatcgagtaatcacctcatatgccaactccatcctgactgtggcgatagcacacgcgcgcttatttcgtcgttctataaatgagcgccattcccgttgaataacgatggcggagaagacatgcttcaaaggcagaggccggggattttcagtaggcggcgaatgttctatttttttgggaactctgacggcattccctcgagtttcactcatattcactcgcttcattggctctatttgcgcttcattgggcttggttgttatgcgtgttctgagagtggcattttgcacagctggacgggccattttgatcaccgttgaatgattttctgatttgctttttttcttggtgatggcggaaaatccaggagggatattttctttgccgccacctgttccaggtttatcaaaggttgtcgcccctgcctggaaaaccttcaagttttgctggagcggagctctccgagtagatcctgtcaacggcttttgtggctggcgtctagtgtgttgtgacttgaaggttttgatcccagcatcccctgagatatgtggaattgtgtctttggtttgccgcttgggtgagctgtaaagatccatgaagacggtgggagtgatagagtcatcagacggaatgtatattgtatcccactgtctcgaagactcgtgtctcgacaggctgtgagttcgaccttcgttaagaaaacctgacccgacatcgaggctttctaacaagaagtaaagtttcatactgagttaagagttgagtcaattcctgtgaaagtgaggagtgtgtcgggattgttgtgcagagaagcggtcaggttaatcaagggatagattccaacgcggggaagatgcggggtgagacttgatgttatcaacaagtttgagcaactgtacagtgaggtatggaatcaataacacagatcgaggatagcctgtctccagggctggaacagtcaattactatgagaccatgttgacctgtggacgggttgtccagggcaacacgtgggggtcaacacgtgacatcatcaaaccgaaggatactaggagtacggatacggagtacacacttccccttgctgtacgttcttacgaatgcagatcgttcaattcggatatgactctagtccgatatatgtacttcttatcacttcgccgaagaggatctaatttcatggcgacgcccaaatcagccttggttgcatgatgtcagactgggatatggctcctctacaacataggccctaaccaagaactgatgtttttgttacggcctagtgacacgccattaaccggccatgcgggatatccgggaacctggcttcgtctcctaagtcctgcatccctttcgggagttagcggtttcctgcaggcgggccgatatagtctagagcgccgtcatcgaccgagtgatctccgatcattcttccgaggatactgcccattgcgccactcttcacggtatgaaggcattggggtcaagatcgacatttaactcgagatctagatcgtctattgatgcatctgtgaatgcctagatggatgaatttgaacatatcgggattctggtcacatgcattggtctaatctactccaatttagcaatggacaaggccattttacagcataaaccacttcttctcttgtcctgcgaccgcaagtccaaccttcccctcatcagctagttttgatagaacctgcgatataaaaggccccgccattgcctccatctcgggtccgtagagacttgcgatgatgtcccgcgtcgtcagcgatgcccttgtctttgtgttggccccgataaaagccgataaaacctttttttctcgcatttcccaatgtctgctccagactatgagtttggctggcaggtcgtcaatcacggcaccatgcccggggtatccaactgttatctcttcattgcgcacaccttgggtcataacttgcaaactcttcatatatggtcctagatcttccacaacaacactgcctccatgcccaagcacattatcacctgtgaacattgcgccgctttcctccaagataaagcacatgtggtcttgactgtgtccgggcgtgaacaaggctcgcagtgtagttccttgcgcagtaaaagtctgtccatcgcgaatcgaatgttggccccggtccggatgggccttgtggaccgccgcgaccagatgtggatactgagccagtagcgccgggagaccaccggtatgatcggtatgccagtgggtcagcagtacctgggagatgctcaactgatgttggtcaagatagttgacaagagtggtgagccagatcggacatccctgtcgacatgacactcgtgtttagtctccaggtactaaactgggagggtcaaaatcactcacctgtcctgtatctatcaaaatccgtttctggccactgccgactagatacgtattggttccttgtagttgcatgttgcctggatttccgccgagtattcgaaccacctctgtgctgagttttgcgacagctgggagatatggcagtccagcgtttcgggcagatagatattcctgccaccctggctgcgtccatactttcggaggggacatgtttcttgttgatcgactctggatgtccaggtagatacctaggctttgcgatttgagtaagtagtgttggaattgaaaggtggggtccattcgtcatgcatggctgcctgatataccaggtttttatccccaggctaggactacccgagtctctaaatattcaagctggatatgtatgtatggcttcaatgaaaatctgacttttacgatccgacaagactttctagtcgataatcatcacagtaccgatccatcgcctccaccttccatgtatcccagttcaagatgctaagtaagacctgacatattgcaactggaaaattgaaaatcaaatttattcgtattgcgagggcgggcaaaagagtcagttcggcaagtatgcggatagtcagcctccttgctagagatttgcaattgctaatatctctcgcgagtttggttctacatattaccgagcaattgcgcttgaattaggaggagcatgatcgtcgttctagaagcatcagggatggtgatctattcccaaaatggatatatacagctggcggattataatcgatgactcatcattgtgtgcataactcactagttacatgtctagaaggctcgcttgcatgcagcatacggctcgacagatggacatcgtacgaaccttgttggtccattgatcagattggctggaaactagccatataagtccacatgtatatcgtacttttatgtaacctctaatctcctttaaattacctcgacacccttacttataaaatcatcgtcgccaggaacaagtaagtgggtcaagtctaaattagactctcgtgaccgggagacctcctttccccggatgtgcctcaacgtggccctaggcattttcaacctttaacatttacattcttttgtgctcggtacttttctctttgcccggcgcctgtcgttttgcgacatggatctcttgtgagcgcctgtcttatcacctgttttgtgtcaccactcgcccacctcctccgctgccctgccaccgcggcatgatcccgcaacatggaatcaatcgtgtatgagaactcgcctttggccgactatttggaaggttcgctacgtccgtgacacgcgaggaatataggtccactgacagccgtgctaggggagggtggaaacgaagaaagttggcccgtggaggagaatcagagcgacgatgatcatacccgttcctccgacttcgcccctcgaggggcttccaaatttcaggatcgcgttagaaacaagctaccgaagcctctcaatctacgaggcacaccgcagggggaactcatcgggaaactatatggctcttgctcagtacgcgaccctccacgattgaacaggttcatactaacacttcttctcgctagtccgccctgaacgtccgactaccacgaagcgataataaacgatttttggaacaatttggctacgtcattgtcgcatcgcaactgttgaacgaacacagcgctccttcctacacttctgctgcagatgtcttatctgcaaaacaaccttcggatcttccgtcgctatctacaacttttggggttcaaggcgccattgtcacagctgccacatcattttctatcgcttggttgctacattggagccgttcgaggactgggtcgggattcagtctcaagaaagttggagtgctattgatacttgtgcccgctgtcggtgtctttttctatgctttcgcaaaacggcaatggttgaaatatctccggcaccaggctgttgaggcagctggcgctttcattggaaacgcccaggggtttgattctgctgcgtcggcttctgtggtttttatccaggaggttgagcttgtgtcaagaggctatcggatgtgagaacgtgattctttttgtccaagataagaacaggctaacgaattatcacagaagcactcctctaccgcccatcagtcggctggaagatctagtacaaacgcgacgatgcttgagattgcgccgagcggtttccgaatgcttctactccatgctcgagcgatatattcaatcccaaaacaccttacgcccacttaccgatgagggcgatcttgcgaagtattacgacatttatgacattggactggaagaactcgaagcggttgaggcgtccctgtcgcagcgaactaacgaagaccagtattcattgcgctctctaagggatctatttggaaaactgtacagtgtgagaaaaagcgttctgtgctgcttgctagcccttagcgccgatgggggtggctccgatattacacggtggagttcagctgtcgaggaaatgcgtgagctagctgcggccaccggcaacagcatgctgaaaatgacagcaatcttaaatgaggaggaccgtaagtattaatctgtgttgtatgacacggacgctagctaatattcgcaggtgatatcattcctccatctccattaccttccgcctcaccaagcaaggatcacctgcgtgctcaatttcgacggctcacctctttgtcacaaggggtccgtgccttgcatgctaaaatgcacattgccagcgaggagtcacatgccaatctagaacgcgcagatcctgagttcgaagcaaccctcctctcacaatatgattcggttggaaatgatcttagggctcttcttcacgaatgggaaactggtaaagccgcattggcaaaccaacacgatcgccttagtgccggggatcgctcgcgaccgccaagtactttcttacccatgtcccctacacccagtctgggaggatccacggcagttgagggcagcccaacggatgcactgaaagccttaactggcgaggcccggccggatctgacccagacctatgatgacgaggaaattttcgaagctgttgtattaccggcctcgagaaacaaaagaatgtctttgtcaagagacgagcgtcttgcacgtgtacgagaagaccgtgccagacaggcgattgccagagaaaaggtagatgccagtactaacatgctcaaggaattggaaatggtcatcaagcagcgaccaggaaacaactctgcaaaacgagtcaccagcatctaagacatgcttgatgcattccatataacctctttttttttgtccacgccatccagcacagatttgacttcgaccagcgctagcagcagtgaagtcacaaattgatacccacaacatgtacatatagacggggctcggcgacagcggtgtttattcgaggactattgcttcttgcttctttcttttgtgccattattatctgtttgactgtctttaagtggtcttggatcgcgatcctttcggcattcatctccattgagtgtggcgatcaacgttaattatttgctaatttgtacattacagctggctcttttacgaatgaattatccttccaatatcctaccactgttcattgtgataaaaaaccctagatgtatatgaaggaggccttattgccttattgcctgaggtatcaaacttaacccgaaacggacatatcgccaaacgcgaccgcgtcttccccacccccgaacgcgatccttatattagaccgctgcctctttcatcttcgttcaaatacatacccagttcattattctcgtctccccactactctcttcactaagaagccacactctttcctcttctatttccctacgactcagttaaaaaaaatccccacacaaaacgatcaagagtaagtcggccaactctcaaatcgaaaagattgttgtgtgcgaagaaccgaccaactaacccactccctagtgttggaagcacgattggaacaggcaagccttctgaagcgcgtatgtgatctataccactcaaccaattcagcaatgaacaattactaacactgttgtgtataggtcgtcgacgccattaaggatcttgtccaggactgcaacttcgattgcaatgactccggaatcgccctccaggccatggacaactcgcacgttgctctagtttccatgctactccgtgccgagggcttctctccctaccgctgcgatcgtaacatcgccctcggtatcaacttgctctccctgaccaaggtcctccgcgccgcccagaatgaagacatcctgaccctcaaggctgaggactcgcccgattccgtcaacttgatgttcgagagtccagacacagaccgactgaccgagtatgacatcaaactcatggatattgaccaggagcatctggccatccctgagactgagtactccgccagcgtggagatgccttctgctgagttccagcgcatctgcagagatctcaacgcgatgtccgagtcaggtaagtaaattttcccccgaggcatactcaaacccggtttgcagacacacagatcctctcgtgctaatttcttgcgtagtcgtgatcgaggccagcaaggagggtgtcaagttctcctgccagggtgatatcggtaatggatccgtcaccatccgccaacacaccaacgtcgacaagccagagcagaacgtcgtcattaacctctccgaacccgtcgccctgaccttctccctcaagtacctcgtcaacttctgcaaggcttccaacctgtcttcatctgtcgtgctgcacctctctgatgaagtgcctctgcttgtggagtacggtctgggaagtggccacctgcgattctacctcgctcctaaggtaagttcttgattgttccaaggtcgacatcatggaaaccgagctaatgtgggggtttaacacagatcggcgacgaagactaaacgaatcatccagtggttcgaggggatatgggcaatgttaaaaatgaagctcgatgataatggagagaacttggaggaaaatgttctttcatacatccctgacgacaaggggttttacaagatgttcacgataatttacacattcagcggtcgaggtttcgatctcgcaaatttttccaaacacgcatctttcacctagaatttcaaagatttctaacttcgctacaagtacggattaaaagatgatatcttagatatttcaccgaccattaggccagcggaaagatgtattttattgtgtccataattccgaagaaagccccgacaaacccaaagccaaacccagcgaccgaaacctaacgagcccgcaggcaaaggaccctaaggaacctcgcaaggatggtccacaaccccactaatcagcaaggtcgccaaattaaaacgcttctcagacacccccaacaaaaaaaagaggaggggaagcaagaactgacctgaaaaaaaaaagtgaagcgccatccccaccagaatgatcggaatcgaatgataccatccgcccctccgaagagaagacagaacaaggtatgctgcgtattgcactaaagtgtcatcacacacaatctccgcaccgactctcccaagggcttaggggcaagccccatccgcccgatgtttctgatgtcaagtgcaagtgtgggtaagaagtgatctaggatcacaccaggccctcacgggcaggaccggcgccgacgcgcgaaaacgaacgacggcgcgggtcggggtttgaagattcctccgaatttctcatttgcaaggggtctcgcggctctgggcaggacccagtgctgcgaggacgggctgtgaagctcgccgtgtgtagcaaagaaacgcagcattggtggggatggcgcttgaggaagggaaatttggcgtggagaacggtttgcgggttttatatcgctgtcacgtgggatgagtcatctgtgcgcttgtcccgtttgggaaggtatagggcatccagtgttgtgagttgggttagttgcgctacgaggtttggatggagtgcttcttttaacatcaagttgaatgcaatgattctaattagctgattctcagcaatttgtggctaagtctagagtacactctcggtttaggtcgaacgatctgctgcttgtgctagatttcctcgaaagctcgaacgatatatgtctttccttgaacttctactttctcccccggtgttctccaagatcccaccccctctccatcaaatccgaccaccatcgaaggcaaagagcccgcagcttcgccaaccaaatacttctcattccacccggattcccattcttcccttctggcactaacatcagcgccagacttcttcacaaccagatcaccagatggagtcttctgtcgcgagtgaatctgcgtctggcttagtgccaaatacgtgccccagatgcgaccgataaaagtcttgctaacagtcacctctccttctccactgccgagatctccatcatccgactccagcacccacgaaatacctttattaggtccttctgggccctctctgaacggcaactcccgccatacctcctcatattccttgtcgggtgcgccaggaagatcatgacgaggcatagacccgacctcgagatcatcaccgttcggcaaggggaaaaagctcccacaatcagcaatttcaaacgcattgtgagagtcaagctcatgggagaaagtcacccgcactattgagttggttaaaaagtagttcatattcgtttcgctgaatgcaatggcatcctttggataagggacttacacggctcctgaccctccacgatcctctgcccagcaatcgcccagtctattttgcctgttgccgtttcgatccgcagatcaacgtaccagtccttcacggacatcacaattgtatcggttgtttcctcggccggtgttgtaagccatcggaacgagattcgcttggagaagcgacaggtggactggttaggtttgttgaccatattgttggctttcgctggatgttggattgttatggtaggaattgcctgtttctgtggctatattagatggtaggcgggagctctgctaaacgagatgtctagataggtatgtgacaagagccagattgggaaggttgaagagaatgcccagccatttggttatcttcccctcacaccccgcattcccctccagggacattctcctcacggacattgccgttaattatgatcggttatcaaattggaagattgggaaattgatatcaaaatttgatggttttacattgaattctgggtccatggcaatctttcaatacacaaaaactgggtctcatgtcactctatagctgtaaagaccagcttgcagctctgccccttgggcctcgaagagatgatctgatcatccagcttcatagaagcagtcatatccgaggccaccgtcgtccgataacgagaatacacttcccgaagcagtgtcttcatctcaacaagcgcaagactaaccagtatcagccatcagcaccagccaaccagggcacaaggaagacaactcactttttccccgtacaccctctcccacctgtagcaaacgaaaagaatagcctattcctctcagcagccccctcttcaacaagccaccgatcaggattgaaacgatcaggctcagggaagacactctcattcgtccgatgcaccgaataaggctggcaactaacgatagtatgctctggaacgaagaacccgtcgatctcccttccaccagcaggtacatagcgaggcagtgacatcggaataggcggcgcacaccgcagcgcctctttaatgacagcatcgagatacacatagctatccaagggtgcattgacaggcgcagcggtaagctctttgtaaaggttgtgttggaaatagagattgtgaggttgtgagagctcccacattaagaaacacaggccatcccccgttgtgtcgatgccggccgccatgtggtctttgcattctgcggcggcttgcattagttccaggttagattctttgcgcttgagtttttccattaaggagtagtcgtcgagctcgatttgggcggccatgtctatgacatattggtttgcttttggggcgctgcgggcatggaggaactttgggaaataaggtgataataaagggagatagtactctaggaggttttctgtttgccgttttagtatttatcaccagaacatggaaatcgggcagtgcatactttggagactttgatgataggtcagttcgtgcatgatctcgaagtcttcggctacattgagagatctcaggccgccggggctgaacatgaaatgcgtaacgcagtccagggcatagcagtgaagcaaagactggaagggttagcatttctcatgttggatgctttaatataatgacaacccacgtaaacatccacactcttttggccaccctcgacacacttagatacaaacgtcatggcccgttcgtggataagagccatgggtttttctttcatgatattggtcatggcgtatctatcggcaaagatgcgttttcttttgctgtgctggtgtatattagcactcgaatgttttatttctattagaaatatgtacctcgtccttcaataaagtagaaaacattgtcctaagtctttgtattagtggctgccagctatttctccggtgcaaaggcttacttgatcttgaactgcctgaaaagatcatagtactcggtcttgtcatacccactcccccccgaagcatagatctctttaatcgcatccaggctggtaaacgatagttcattgggactcagccggacgacaggaccatagatcttgtgcaagcggtgaattgactctcgtcgattggcagtgaactcctgatacttaagccacaaacttgtaaatcgagtataccacggacccggaattgtagacaggggcgagaagaatccgcgtatgactatatacccacaaaggatgatagccccggcccacagagacagcatgttgtcgtatcagagagctcctgggtgatgaaaagtttctcttgaagaaggccgaatgtgcaatcctacgcttatttataccatagatctgattgaagcatcaataattcccattagataatagacataactttggagatttgatagtctttgcttcaacagttaggatttgccgatatcatcgttatcggagtgcggggaaatgcgaacagacttgggtttgggttgcgataagatttcagactttaaaccaaaaagggaaatctgaggagatggtaggatttgaaaaaaagaaaggttattcccaatgaatgtcacttgatagttatattgtagctaaacagccttgtcccgatcttgactgggattcatctctagaacgtatggcaggggagataaactgtttatacggcagacgggggaagatgaatgcaaaagattatgccgtagccgatcacttaagacattggatatctctaactgcattcaaagattcactggacagcccatatgtcaccaagcaacctctcaaacacaagtttatggctgcagccgaagccaagatcaaattcacaaaacagtttgaaccaatttcatgctgatggttgaaagctacatatacaatgatattattatatggagtagtaatcaatcaacggtgcattaagttacaataatagcctagtgatgggggtaagggtgaactatgacatcacatagattccctttacttgaataccataaatagaactagacttgtgccagtgcctcgttgactatcaacaacaacatagtcgagagctggatcttctatagtggagagcttcctaaatttggtgtcgcagtattgagagagctagtatcgattttatcattcattacaaacgggctgcagtcctaaaaagacaccaccaggttaacgagttggatatgctcgatcatgagcatataatctttgaaatatgagacctcaaaagtaaaaggtcaagacctgcattccatttcattgttgggcttgtctttgccgagataccctgctccggcggcctttccgttgatcggatccgacgctagatgaccgatccaatgtctcacttctaagggttcttagtgggctgaatgggggttttctagatgttgccgatactccaccaggttagaaacacgtccatggattttgtcaggcaattctggagatgtattggagaagactatggttatcggggtggattcgcataaatgcttcgattggcgatgtgttggcgttgatcaacacatggtttatgtatcgtactctacacaaattccttggtctgaatctgggtatttcgaacaatgatggagcctttagccggctgtacctaatcggaagaaagtggaccttctcgacgtaaggaatcattcgcacatcatggccgatcccggtgcatagtgctttagagatcctgcgaaagcacctaggttccgaagttctaggccgcggagagtgaaagtgaggaccaaaatagagccatggaaatgaaagtaagatcaaacagggatgatgtaattatatttcagtaccgaggtacagctgtacacacgcacccgcatgaaccaaggatgacttggtcaggggccatggttcagacaatctttaaactgcctcagccacttttgtatcagccacattagtgagatcgtattccagctctcatatgttattacaacatacagcatgcttcacagccttacctccacattattttctgcggataggactcattgtggcttagactaactaattgacaggccggtgtcacaggttaaattggcctgagatcagggtcttacccgtggactccagccctgggctactagcacgattaagtaagccaaatagaacacctgcctagtgggcccggcgggcatccgcccgggcgtcgtcgatagcctaaggcgttgaaacagtcgaataaaggattctctctttaccaattagacgacccaactagaagagtacaatatatgtaagacacacaaaagcaaaagaagaaaaaaaaacaaaagagaatcctaccaagtacggagtaaaataaaaaaagtctggactcgactaagtttggtacctgtcgcatgtcgatggggctactccactgccgattcaggagaaaaaaggcgttggaatgcagaaatagtgtggtggctttgtccgggttggagaaacagcttttcagggactctacggtgcatctagaatgtttgtagtaagcagagtcccgacttgtggttattccgtacatagtgtacttcgtacactccgtaggagcctgcatactgcgtatgtgtgacccgccccatggtatgtggacaactttggttgaaccccagatgtgcccctactttctctcccgtctcgaatccggccttttttccttcttcaccttttcttttttgtcactcgttcgatatttcctccctttttatttcaagggttgaatcagctgtacggtcgctgccacaacgcattccctcgattccccgcctcacaattcggaactctgcgggataaaaaaaaaacacaaactacaacatacggaataatacctagagaaatcaccgtctatctttaattcgactcaactggtttgagctgtctgcttgacagtcggatgcccctgtcgaggctttcctgcgtctaatcacacgtctcctgacgaatcctggcttgggccaaccaaattgccaagccacagaagcacacgagcctccgttgtgttttaatttgcccttcccccccgtgtcgggcctatttcccaccggtcttataaagcgaacgccaccgtcaggtggttacaccgtcgccgtgtctttcactaaccatcccgccgacctgagctccacgacggagcctctcggcaagattccttcacacgggtcgcgcgcctctctcctgggggggtcttttgatcctgcctttcgacgaggtcagggagggttccgcgcacgagagggatactctaatgtcactcctgtgacccatagccccaggatgtatctcccaaatacatattggacatggtcctttgcgatcgtcacattcgtccaaacaatcgtgacactcagccttgaaaggtatgaaactccaccgatgcgaacatgggaaatcaacattaacgtcgccattctttctagttacatcttcgcgaattttcaattgcaagaactcccaaacaacagccccgcctcgaaaaccatccctactttcctcgccctctatggcttcggtttcctctacgaacttgtgctggtatacgatgctctgcggatgaagaatacaattcaggtcatcggactgtgtatctgcaatgttggtctcctgatttacggcgctgttcaagtgaagcaaattcgagaggccgtctccaccttggccttgatgaatatgatcagtccggttgtctgggcccagtcggagccgttcctgatcatcattccgtgcatcgtggcattagggacattactgatcactttcgtcgcttataagctgtacgacgagtttgcatggacaatctacaagcatatcagtgctgatctgcaaatgaagcgtcgctatctcacctaccaggtttgtgttccattcgacttccccatcagcaacacagctaaccggtcactaatcagatctatatcgctctcttgaaattcgatttcttcttcttcctgggctttactgtccagttcctcgtcttggtctcctcgactagcatggacgttgaatttgcgcttacggtggctgccatccccgtgaccattatcattctggtctgtggcgcctggtttgtgcgacgagaaaccatgactggcatgatcatcatcattgtaagtcgaataccagcaacgttgattcaccttctaacagtcttatccagctcctcttattcgccgcgatggggtatttctgcttcaagctattccgaatgtactccccgcagacttacttcaaatacctgcccgctcgaccatcgatgaccttcttcgccgtcatcaccttatttttgattgtgatcactatcgtcaacgcctgcatgtgcgtccacaacttcaaccgcggtttgaagccccacatcaacaagaagaagaacaaggaagcagaaaagacaaccgagctctcttcgaatcttacccaaataccatcacggatgatgatcgactgatcacccggttcgcaaaagggtgctctataagtaattttctggggcgttgaattttggagcgtcctgtctttttttaatctgcgaacttcgtgtccgtgtggacaccttgaatttagcctgatctctttgtgcatttttctttctttttcctgggctttcggctcagcatgatacctcatttccgtcgaatctgctctgtccaccatctcccattcttcctgactctgagctgtcaaaaatttcctgtcattctattttccttggttccctttacatgttcatatccataccccataccccatacccctgcacgagtgcaccgacggcgttatctgaatgatttgattcccggaggtgtcctccatgtcttacgacagccatcgatgctttttccgatgaatgtgaattagtctttctcattagttcaatggacttaaagcacgtgaatggtattttagtagctatatcgatagaattgaactttctacctccgtgtcatacatactttgtacataacatagactgaggtcagttgttcactcgttaaagaaggtgctagttaccccgtacatattgtagcaatatgcgccgagttattctgattggtggatatttttgtactgtaaatactggtaattatcacctaattcgcttccaactgccggggttgacatgtcaaatacggtattaccccgaaaaccgcgatcgtggcctcaactccgcaaacctcctttcagaccatctcaggctcctccttccctttcttcttgaactgcatttccatctctcttttaatctctttttcttttcctttacactcttctacacgcaattaatcacaatggtaagttcatctccccggacccgaaccccatcaaccacccatccgacgatcaagccagcttgccccatccaccgccaacccattgcgagccctcttgcgaatttctcaatcccacaattaacataatgcaccactaggcctccccccgcccagcgtctcccctcacctcaggcgccgagtccggccctgactcaaagtcaggtgccgccgcagccactggcaactccgtcggccgtccttcctctccctctactcccggcggtcctcgtgctgccatgcgccgccgtgccaccgctgaccataaggagaccctgcgcaatgcccgtcccagctccactcgctctgctggcgccggtggctcgtccggcaccatgctcaagttgtacaccgacgagagccccggtctgcgcgttgaccccgttgttgtcctggttctgagtctaggattcattttctcggttgttggtctgcacggtaaggaatcaccactgatgatgtgaatgtttggggtcattgtttgattggttgctgatcgttttcttctctctagtcatcgccaagatcacccgcaagttctccgcttaagcacttgatcagcctcaattgcgcagttgacatcccgttggattttcgcgtacggtctatctatctatctcgggcgttgactgcgcgctccccgacctcgaatcctcctcatcttaccgcctcatttcccgactcctataccccgtgacccttgggccatttctcgttgtggcgctggaaccaaatcaacccttccgaaacaactggcgtgattccgttttgttttcattttgatgtgtatgtggtgttttcatttgcgttgaaaaagagagttactcaacgacctatctgctgtataggtcattctagatagaaccggcctgttcgtgtctccgtcttgactttctattttacggccattggctcgtttcctagcgatatcaagcgctggaatatgccgtggatgtgctagttcggaccgaaacatggtggtatttgttctatccggacgcttgtctgtacaatataaagaattgattgaatctgttcctagaattagacctgattttctagtggctgaacatgcatataaaccaccaactcttgcttcacgtcattccggtgtcacaaaaattgcagaacccgcaaacccgtcattttggaactcgtctagagcttctagttgttttctgtagacccaaatgccttcgtttcataccaagggatcccaataagcttctctcgaccgatcaattgcttcattgctattgactgtgtagttgataatgcacttgacaattcgttcatccagatcatccagatagcgacgccgacaaacagcttcgcagactttgcaatgtttagcataacgtgcatatgacttggaattggaggtatcacacgcaccggacatcgcatagtatagaactattatgggatttcaaacacctcccaggatcaggccaacatcccctataaacctattggtaatcatgcataatcctaggagagctgctctatagaatgaagaaaggcagcggccttaggggacatggtgaaaccatcagcagcttactgcaccagaggcaactcctcgccacaattcgattcgttttcagtggagccacatcgaagttggtctctgaacgccgggattgacccgttccacctcaggttttacatctgcttaacttgatgacaatgaaagggtagcgacatgaatgtaaggacaaaagtcatgaatatatatagctgagcggaggcaaggacgaacttttattctggggaacattagggttttataggaatggctaacaaaggaatgcgaacggaccaggcaatcatggagcctataatctatggatttcaataacctggactgcagtcattgtacaaccctctccatcgcctttctatcactatacccccttccccttcaatatggcgtccatccatctaggatatagcagcgggttgtagttggactatagctctcgggaaaaaaggtcaagaggaacctcaaaatccatagtgtctgcaagaatcggagctctagaccatgccacaatcacccaaagccagttcccagacgatttagatttgtttaagagttgataacaaccttatctcttaggggtcaatgcatatcaggtggggtaccttggggtctcgaattaagctacgattgaatatggtcaccttgtactctttttcgctggtcaaagattagatgtaggttgtactatagagcagatatgtatatatcctccttttacacctgatttcatcgaatacaaattgtattcctgatggcaccatagttatatactttgtaccaggtcctgaagctcgtgaaacagaaaaaagatatgtatatcttcaaacttcaaacttcaagattcaacgattagataaataaacaagcatttaacaggtctttgacttggtggcacaatctaggcaggacttgaggataagcagtctatacccccgaagtcgggagtatgatatactatgatgaatatgataacggacttgattcacgcttcaagaaaagtttgattgagagcaactaatcgaggcaatataatgttgacagaatttaaagtgaacgtgggggagatagtggatcatatacggagtaataaagtaataagaatgagtaaccttggaacctttcactgccaagcatccttggagccccgggataccccgatatcccctaaacatctgcgatccgtttacatcggcagttggcactggtaaatgtcaaacgtcgcgtcgaacagcgcgagtttgccgactcgtaaactcttatcttacatgttctccagccaatcacagccacccagccatatgtacccttgacggtaactgataacagtcagcgccaaccaatgaccgacgacatgtataccctggtcaaaaccttcatgcttcacatcagagtgactctttgaaatccccgcgcgagtgctccattgtgatgttgatcccctaactctagtggcgtacttagacggtccatatccctactatgcgcgccatggtattacgagagcatgttgtccttatctggcaatcagaatggagcatccctatctaagcttagggtcagggatcgtcatgctatactcccgtaccccagtgcgaattcggagctgggggtccataccatgcttctgatgctatgtgcccggacctatatgaggttgctatcctcccggtctgggaagcttgatatcccatctgccaagtcagggttggaaagttatacaaggcgtactttccatattaactggagcattagtcgctgactcccaattcaaggcaccttgccatctttcatatttctgttgtcataaaccctcttgatattcacgtctacgacatgtcgtccgacggggttattttcacagcgcctttgtctcagagctttggatatggaattatcttaggcctaggctttgcctttgccctactgatgatcttcattacttgggccttgaaacggtgcgtctctatgccttcatcgatatcacccacataagctgacaaaatgcatccatacagctatcagaatgaagtccaaacatccgagatgttctcaactgcaggccggtccgtcaaatcaggactggttgcagccgccgttgttagtagttggacatgggctgcaactcttctccagtcatctgcagtcgcatacaaatacggtgtctctggtccatttttctacgcatcaggttagttccggcggtatgcgaatgatctgaaaagctctatatctaacagtatgtgtataggcgccactgtccagattctcctattcgcaacactagctatcgagctgaaacgccgtgcgccgaacgcgcacactttcttggaagtcatccacgctcgctatggaaccgtcgtgcacgtagttttcatagttttctgcttgatgaccaacattctggttactgcgatgctgctcaccggtggctcggccgtgatgacatccttgactggagtgcccactgcggcagcctgcttcctgctcccaattggcgtggtactatacaccctcttcggtggtattaaggctacttttatcacagattacttacacaccgtggtaatcctggtcgtcatcttcctcttcgccttctccgcttatgccacaaatgccgagctaggatctccatcaaaggtgtatgacgcgctagttgcagcctcccagcgtcaccctgttgagggtaatgcggaaggcagctatctgactatgcgctctaaggagggtggcgtcttctgggtcatcaacatcgttggaaactttggcacggtcttcttagacaacggctactataacaaggctatcgccgccagtcccgtccatgcattcccaggatacgtcattggcggcatctgctggttcgcaattccctggctatgcgcaagcacgatgggcctctccgcactggcactagagggcacgcagcgcatgagctccagcgacgtgagcgccgggctagtgctcccctttgcagcagtcaagctgctcggctatagcggtgccgtcgccacaacattgatgatcttcatggccgtgacatctgcgttctcagcgcagctgattgccgtctcttcgatcttcacctacgatatctacgcggcctacatcaacccaagcgccaagggcaagagacttgtctggatctcgcacatgtcctgcattgtgtactcaatcatcatggcgggctttgcgacgggtctctactacgccggaatcggcatgggatacctctacctgctgatgggcgtgatcatctcctccgctgtcttcccaggagccatgacccttctttggaagggccagaaccgaatcgcagcagccctatcaccgcccctcggtctggcagtttctctcattgcctggctagtgaccgcaaagaagcaattcggaaccctaaccgtcgatagcactggctccaagtaagcattcctttctcaacatccatactgcaaacccaaacctaacaaaccgccacagttaccccatgctagccggcaatgtcgccgcccttctcagcccactagtcttcgtcccagtcttcacctacatcttcggcccacaaaactatgactacgaatccatgcgcgctatccgcaaagtcgacgacacagaagtcgccgccgccgctcatgtcgacctcgaactagttcccggcgagatgggccccacgcaagatgagagcgaagaagaaacacgcctgctcaaccgctcggcattctacgcgcgcacgctgacagtctttatggcacttgcattcctgatcctctggccgatcccgatgtatgggtcttcgtatgtgttcagcaagaagttctttacgggatgggtggttgttggaattatttggttgttctgtaccctgtttggtgttgtggtgttcccgttatacgagggtcgcgcgagtattgtacgtgtagtgcggatgatgtcgcttgatctggtggggaagaagcccaaggtttatcgaggaacgaagggcggtgccgatgatgtggctacgccttctgggctggcgacgccgacggatacgcttggagaaaaggataagcagaccttggagagggaggtttgaggcttttcctggtgctatctttactggttcttttctctgtgcctttatcttggcttaatatcttgtttacggctatttataccctcctactactgaatctcaatttcaacttcatgtgctttattattatgtgctccaatcatggtagcaagtgagcattttataacaaccttctatattcttatgaggaatagaacatgctacgccgatcgaatgggcagttcaaaattcaatagcaaaaaaaccaaaaaaaaaatacagttacccaacgccaagggtaaacccacgatattaagccggaatatgtgtctcctgataagcccttcttctgcctcacaatcccgcaataattgctgcatccttatgcctagtagaatttgaacattggaaactcatttgtatccaagtccaccctgtgcttgaggtggaggctgcagagggggctgttgctgccagcctccctggacctggggaggcggctgaatgccgtattgcatgcctggcggaggtcgcgtgtcaggcgtgatatcgggccggtcactgatgtaatcgctattagtataactatcatttgaatatatttgggcaatgcttaccgtaggtcttgggtgtaacggcatgtgtgacattggacctcctatatagtacgttaacgatagagtcaaaaggtgattgatacaggcatatttaccttgtacttgtgcgtagcaaggggaatcactggctgtagcgaggtaaaggttagatatcttgagctgttcgtcaagacaatattctggcgattcataacttacaatgaagcagacggtgaaaaacggccttgaagaattattagtcaagttcaaattattctggtcaggtcctatgggccagaaacataccatcgggtgatgcagtaaccattccaatgttggcctagaagcggagaatcaataacagggccgatagaccactgacgtcagaacttacagttgtagcagtatgcacgaacattctcatagccctcgagctgagacgagaactctgtattcgtggtcagtatctttattcaatacgactgagcaacgtcgacagcacggatacccgtcagggacagggtccactctggtttctggatcgtggggtaggaagacttaccatgtgttccaaacgtgatacagaaagccatggtaattgtgagatatggagaagttggcacacaacgaccgaagagaatcaacagagagttgagaggctacttgcgattgaaagtcgattagagacgaaggcagcggcattgggggtgtggcgctgtggcttggcgggcttggcaggtaacacgtgatgtcagatgtagtggtgcatgattggccaagtgcccctgtataaaaggcacatgtgattattgattccagcagggacccgttgactatcagtgattatacatgtacatatgtacattttagtaaattgtctgaagagtctgcagtttttacctaggacctaacctcgagcaatactttcttttggtgttttacgtgttttgggcagatgcgcttaattcactaatggctattcaccataggataacagccccataaaccaaatattagacaaaagagtcgcttgaaaacacatttctccggatatcacctccccatcggtgtagaatgccgagcctagacacatcaatcacatttattgggtcttgaagagcagaattgcgcagtgtccgaggtagaagtagatgaagtgcttagtctctgttgaacacatgattagtatctgattatcagcataatggttctagtatccacaaaccatgggtaacgaagcttccaaagttacgaccaacaacgcagtgccaggtggcgcccttgcgggagtcgaactaatgtatggggttagagatattatcaggcggggtagaatcggggtagaatcggcgtacctctttcttgatatactgggcaatatcctgtaactggttattatctaattcatattggggatgggatttgaggagtgcgtgtaccttttcaactctgaacttctccatggcctcaatggctggggggtaggttagctttgtttatctagggcgctctcgaagtttcataccgagggcaatagcctcctgctgcatatcctcggtctaaaaattgtgtcagaatcaattggctatcgtagtttcgcatgagtgtccttaccatgtccacagacttaatctgcgctgcacggagcgtttagcacttgtcactggactcacgaaggataaacttaccctccataggctccttcttttcagctgggggaagtgccattgtgagtgattcctgtatcaaaaaaacttcgaagggggggtttaggtggtgcgccaaaaaagagacttggtagcgtaatctcgcgataacgtacgttattgccggtggacaagccacaccgcctgcccgccagaccgcccgcggcactatgaaagaagaaaaaaagtttttctcgtagaaacttcgagtcttcacactactcaccacaaaaacccaaaatggagagcactagagtgttcgtgggtgctctcccaccgacatgctctaatgatcagctaaagaaacattttgcaactcgctttcaagtcaccgatgctcatgtcctacctaaacgtaggatggggttcgtcggcttcaaaagccatgaagcagccctgcaagctgtgaagcacttcaacaagacatacatgaagatgtcgaagatcgctgtagacatcgctcgtccggtatgtcgattctcagctctttttgcttcagccaccctactttcgcctgtgcacgctgaccaattaaggtggtcttgagactgacccgtattattgcagattgactcaaatgacgctgaggatgcccaccccacacgacgacgtgatgccacgaatgataatgatgcatcgttggataacaacctcaagcgcaagagggacggcgagaacaaatcacaggaccctaagctacaagagtacctctctctgatgggatcatcatcgaagactcggacatgggccaacgatgatgatatgatcaagccgtcagtggacacggttcccgttattaaccaacccgcgcaggaagaagagcagattcaggacctgccttcacacccaaaaaaggcaaagacagaaaaaccttccacggtagcaacgcctgagcagcctgagcccatggtaattgacaagattgaagaacaggaggctcaagaaacaccagaacaggacaactctgcggagcctgaagaggagactagacctgtatctgatgcagattggctacggtcaaagacgagtcgtttgttgggccttctcgatgaggaagaacaagatgagtttgatcaacacaaggccgccgcaccgactactgcgccgatcaaagctcattcaccaccttcctcgtctggcgatgagtcgcctcagcgtgacgaagaatcgcgcactgcggccattgagaaaattgcgcccaacacgactgacgttgacagcatcaccgaggcaacgccggaagatccgaatatcgatcttattcggaaatcggcccgtttattcctccggaatcttgcctatgacaccacggaatctgatctacaaccgatttttgaacgctttggaaagattgaggaggttagtacttacctttttttgctttctcaaccctgccccgcctttcccccagtgcggcagactggctcacagcctgtttgttacgagtgctcgtatgatgattttcccgatagggacatccgatgcaaattgcaaatgatgttaccaggacaagatattttagtagatgcttcttgactatctgaaagagccaactcaacccacttttccacatttacacattatattcaatgaccttgagtactaattgaatatagattcacgttgcttttgacacacgctccacaactagtaaaggctttgcttatgtgcaatactcgcatgctgatgcggccattgaggcctaccagacccttgatggcaagcatttccagggtcgtctgctccacatcttgcctgcttctgcgaaaaagacctacaagattgacgaatacgaattgtcaaagcttcctctgaagaagcagagggagatcaagcgaaaacaaaacgcctctggatcgtcatttagttggaactccctatacatgaatgtgagtttacctcttaccaccaccaatcaaaaggttgagactaatttcgctacaggccgatgctgtgatgtcatcagtggcctcaaggctcggagtctccaaatctgaactgcttgatcccacttcttcagaagccgccgtcaagcaagcacatgctgaaacgcatgtgattcaagaaactaaagcctactttgcttcgaatggagtaaatattgatgctttcaagcagcgcgaacgtgggaacacggctattttggtcaagaacttctcatatggtgtcacgtcggcagagctcaggagtctgttcgatccatatggcaagattatccgactcttgatgccgccaagtggcactattgctatcgtgcaatttgcgcagcctgacgaggcccagaaggctttcaagggcatggcataccgcaagataggtgattctatcttgttcctggagaaagcaccgaagaatttgtttgatggttcagcagctccacccacacttgctccagagactcggggcaaggatcaaggtttctcaactgcagacacatttgccgcagatgaacctgatgacagcgtagcaactacgacactcttcgtaaaaaacctgaatttctcgaccacaaatgagaagttcctggaagtgtttcgatctctggatggctttatcactggtcgcatcaagaccaaacctgatcccaagcgaccagggcagaccctcagcatgggattcggctttgcggatttcaaaaccaagggtcaagcccaggctgctctttcagctatgaacggctacaagttggatcagcacgagcttctcatccgcgcatcccataaaggcaaggatgccgccgaggagcggaggcgcgaagataccgcgaagaaggttgcagcgcggagaaccaaaatcatcatcaagaacttgccgttccaggccacgaagaaggacatcagatctctcttcggggcatatggacaacttcggtctgtgcgtgttccccagaagttcgatcatactgctcgtggtttcggttttgcagactttgtaagcgctcgcgaagcagaaaatgccatggacgcgttgaaaaacacgcatctcctggggagacgattggttttggagttcgtgaacgaggaggccgtcgatcccgaggaggagctcgcgcgcctagagaagaaggtaggagagcagatggacagggtcaaacttcaacagcttactactggcgccgggcgcaagaaatttactgtaggagggcaggaggaagagtgaagccttcgttccttctccctttgacaaggacacggccatggattggctcgttgacatcccttgcagggaaaaaaggtggattaatgtcccatgtacgattacttgcatactaccatagctacaatgtggaaataaaaagataccccgaatactgttgaacacgttctttgcagctgtcaatttccctgcagtcccgtcctcgtgcgtctcgtgccctcttgatccaggcgtaaccgtaaccctactttaccttactgtgcaacacctttcttttctaccccacaacttcagctaaaccgccttggatcgcagggtcattttacctagcttagcttactcttttgatggtacgcaggactatcatcaacagagatcagccaagcctgcattccggtggtgatgtctggcggtggtcgagcattccacgtcccgtgccagaagacaatgtagttggaccatcaacattcctgcaacgccatgattgccactgattattgcgatcttttgttgatgcaggtccgagcgatggatgttcaaggtcacttcgcgctgcacaaaatctccgacccactcatcactggttcgtgctgctgagcatcccttgcatcctagacaacttccttcatatcgagccctgtcttgactcctgatttgctgcggcagggtcggcttgccgtcgtcctttggttctctgctctccacacagcgcgcgcaggccaggatcgggacctgcccaggagtatggacaaggcgttcgagggacgtaggccaggcaaagaagacctggcggaacaatgtcgctactggggctacagtacccctctccaaaggggagtaatggttccatataaacaccatcttgctcgctcccacattctctttcccaggttcttacattctcttgacatcttgcgttcttgggtcgttgtttgtgactgagctgcgttctttgccaggcagtaagcatttgacggtgcctctcagttcccctcctcattggaatctgtcattcttttcgagagcccgtccttggttccctccccatggctactgactggcaacccgagtgccttgtcgctcagaaccagccgtcactggatcctgtgggagctcattctgatcgagctctgcagaataccactgggaatgtccagtcttattcagaccaattggctcatgctggtgtcactgctcgcgatgatcagtttcatcaatatagcttcaagtatcctcatggccctcatcctcaacccttgtcagcacctggcttgcatcaacagcatgtagcggctcggcttcatcaacggaagcttcgcaggcttcactcggttggacccaactctcagtcccgccgggcacaaagcagctatctcaagtctcagaaatacatggagtaccgacgtcgccctcgtcgtgatactggaaaagatggagagccagtgtggtctgatgaattggaagacgcttttcagcagggtaggttcataccaccatagtgatagatgaaccagaggctaacaaccgatttcagctctcgaagcaaaccctcccatgggtcgaagaaagtggtccgaacgtggcaagtcatatggccgcaacgagctgattgctgagtatatcttcaagttgactggcaagcggaggacacgcaagcaggtgtcaagccatctgcaggtcctcgactctttcttgaagggcgatcccgattgtgagttctcaaatatgaaagatgtgtatatcttctttttaacacagtatgctaggggagcgacttgtccgtgagccagcattagaacgatcatcgagtgttcatggctcagcacctgctccgaaatggagaacggcagtagagcacccctcgggatctagccactacggcagccacacacacccttcataccatgaccatatgagatctatgcaaccatatgctggagatctcccaccgccacactatacgcttgggtccaacatgcaggagactgctgctagcaccattcatggctttagcttcgacatgtgggtcagcgctcctcagcaggccaatcgcatcgacaaggcattgcatgcatacacccgtctgcagggtgatctgcaccaccccgttgcaccccccatgcctcttgagcatgtgaacgggtggcggtcttctttcccccaactggcttctatggtggatgacgtcaacaatcccctggattgcgatatcatcttgttagaagtgaaccttgagctaatgaccgacttccctcctactggctcacgactgggaatccagctcgatcttgactacggtcaccctagtgctggcgatgttttgggagtcagccagatggacaactggacctgcagcacgcatatctaccaagatagccagaagctcctagagacttaccacgacctacccaagacacagtcaactaaggtcaagcccctcttcgaatcatcttggtgggctaagctgttcactcagttgactcaagagaaacgtatagccgaggactcaggaaacccccaagctgctcgtgacgctgatgaccatgcccgtcaattcttccgctcattgtctgcagtgcaagagatccgtgccacctcgcccagctcctgccgtctgtctaaccaataccaaggccatcacggcgatgagagcaagcgcatggccgttctggcctggaagttccgacaaaccaggcctggcgaagttggcaccaccacttggagacgactaataccggcaccggaccggactacaaccaacagcccgcgcccagcctccgcggtcgatcgagttcctctctctctggattccatccttctcaacaaaccatcccaccagggtatttaccaagcccctcatcctcacgacctcatccaccaccccagccaatcccaatcgcaatggcccatgtaccaatcacctcatgacaacgtgtctaatctctataatccctccggccatctggacttcatgtcatccatcagcaaagccgaagatggactcaatgataaaatcgccgtcacctcggtgctggactccttctccgccagcctcgcacccgagagcatctcatccacaagtctccacggctccagcggtgcacccgtcatgctcaacgtgcatgacctaccactcacccacccagggatgggctacacaatgggccacgaaacatcacattacgtgccatcccaacaccacagcgtgaatatgcacgacagcaacagcgtgctacacggcttcttcggctctcacacgcaaccgcttgatgacctcagccacggccatgggtcgtggggtacgcactccacatccatacccggagacgtcggcgccggcagctaccatatcccttatcaggccgagcaccatggacctgtctcgcgcgagtcgcagcaaccacaccagttcgacggcctcttgccatcggaggacctaatggataagatcgtcgggcgcatgtccaatggttccggcatgcatggggcgggccccgatgcgggctacgataacgccactgtggatgcggtataacgacatattttacaaaaactaaagtaattataatcattctgggagtggtcttttgaaattttctattcctctttctgtctttctttgtgaatgtcttagctagcgcccggagaaagaatactttctacaccaatcacttacttctatttacattgcaatttccctcggctgaactcctctcatcagccactttagccgcaaaacagcacattttaggaccaactgaggtagattcgatttagcctgaacctttaaattttgtgtatattttcaatattactaggtggggtcctatatatacccctctatgccccaatttcttttttattttgttctcttgagatctcgttttcacaatggttgcccctactgtcaagcttaacagcggctatgagatgcccatcgtgggcttcggcctctggaaggtcaacaaagacacgtgtgccgaccagatatacaatgccatcaaggctggttaccgtctcttcgacggtgcctgcggtacattcactctctccaaatcaagccctaattgatactaacactattgattccagactacggtaacgaagtcgaagccggtcagggtgtagcccgcgccatcaaggacggtttagtcaagcgcgaggagctcttcattgtctccaagctctggtgcagctttcacgaggccgacaaggtcgagcccatcacgcgcaagcagctcgccgactggggcatcgactacttcgatctttacatcgtgcacttccccgttgctgtgaagtatctcgatccatcagtgcgctaccctccgggctggaccaccgccgaaggcaagatcgagttcgccaacgcaccgatccacgaaacatggggtgcgatggagactctcgttgacaagaagctggttcgcagcatcggtgttagcaatttcagcgcccagctgctgatggatctgcttcgctacgcccgcattcgccccgccaccctccagatcgagcatcacccctacctcacccagacccgtctcgtcgactacgcccagaagcagggcatcactgttactgcttactcttctttcggacctctgagcttcctcgagcttgaccttaagcatgctaaggatactccgttgctctttgaccatactactatcgccaccattgccgagaagcacggccgtacccctgcccaggtcttgttgcgctggtctactcagcgcaatatcgctgttattcctaagagcaatgatcctactcgcctcgctcagaacttgaccgtcactgatttcgaccttgagaccagcgagcttgaggccatcagtgctctagacaagggtcttcgtttcaacgaccctgttgctgtaagtttgttacctgcggtgtattgactgttttgactgttaatactaactgttcttttctttagtacggcctcgaaatccccatcttctaagtgcttgcagactcaaaagcccgggagacggaagaatctccgcgatataatgtcgatttttatagcttggataaattaaaaagaacatatcaattccaaaaaattctaaatcttcagatcttctatattagctagagtagcatgcagtcttgttgtactaacatgtacatagataggcaattccgccaagaagtgccgatctcgaagatccgccatctttctccaacttcggatgtcacgacttcaacttcccaataacacaactctcacaatggtgtcccctactctagcgcgcatgaccgcacaggttcatataaccgcatttcccatgccaaaaaacctatctgaaagcaagcttgtactggccgcgctccagaagtttggagaggtaataacataccgcaacctcaaggtacggcggcgccctctctaaattatcattcagacgagccccgatttaacaattgccttagtatgacacgaccaacacttcaccaaaccctaaccgccccattgtcgcgatcttcgagacagccgacgcagcagaccgcgcgatagcagcttcgcccataaccattcccctaccgacatccacctccccctctaaatctcaatcttcaacctctattccattcacatcaactaccaagccacctttaaatacccgccgctcactcatcttcgaaattcaacactcgcgccacaaccacgcctccgccctcaaacgcagccccttctactctacctataacctcttcaaaaacaaccccatctacgaagatctgatcagcgacgagaccagtatcccgctcaaagaactggctgatacactttcgagcaagaagtatcctattggcgctggcgtcaagtctaatatccaggaggaaaatcgccgcatgggcgcgacgagtttagtgaatatgtggaaggagggtatggggatagatgttgagcttgagaatgaggggcaagattttggcgagaatggtcctgtggttgaacatctcggcggtggcattagggagcccggggagggattggaggacgagaagcaaagctcggtagtctgagtcgaggaccaggtttggccttttcttgttgcttagatggtaactagagagggaagagactttcttttattctgggctgatccgcatcagcaagtccagccgaagacgcgctctccttttatgagcagttgcattgactctgggccgaaggcgcagattggattcccctcctggcagctccatagccgcgctttgcttcgaatgacttgcattcagaacctctgcttctcgagctcattcctcgagaaggaggaaggaagatgagaaggtagggcatcttgggatgttccaacattgccccccaagcagacatgatatttgtcgcgaaccagatgaccaaggcaccatttactacctaaataggtagtatatagctttctctccattcttcatcttcttctctctccttgtcccttttcttcccacgggattgattacactgtttctccaattgaccttcactgtaaatcaggaatattctgtatagtttaaactgagattacgtgaactaaataaagaacccagccttgatgtagtccacaaccttggtgatcttctcaatagggaaactcctcaagtggtactactgtggtagtacgacacggcggccgcgattgagctcgattttccgggaaggaggttcttgagaaacaagaaaggtcaaataattgtcaccagagtcctcatcgtcagaaggaatccccgggatatcaggtgcctggatgagagagacatattagatagtataccaagcatcgtatcatgtaacatactccaggatactcccagtcaatgtcaaccccgtcaaggtagttttccttgacgaaattagcaattttggtggccattgtcagtcggttggcggctttgactccctgacggaaaatattgtaagtgccggacatagtagaaaaatcccagccgccaaagatagaatctttttggcccggagacgcgcaaaaaactcttgaactgatattcgatcagaacatctgagaatttgacttcgtaatctgccattaattcaccaaatgcaaagtgcagatgtgtttactctgacccgttaatctgtgaggcatcctggtacagacaatcacgactactcaagctataaccctcgaagtaggcaatgtttcgcacaacgtcaagggcagcaccgcggacagtctccgtaccacagttagaaatgcaaccattcgtgcccttctccgcggatcctggagctccagtgtgccacactattctttctgttaggacgattgcataatctgtttcttgaggaaagaacttacttgaccccaaacattgcagcacgcattcagggggcaggtattgagatcggcaagatctgttgtgtcgtctggcctcttagtactcggcttttgggggccgcacacagcgttagccatgggggcgggcataggcggattcccgctactcaggcaaataatgctatcgacccagacatgaacagccatttcagcctcatgtcttcttgtttaaatcttccagatccttattctcagactatactcggcagcaaggtctgcacaactgtcatcttgttgaatagtgtaggtagcacacgatccgtccgggttaggctttggggtaaaatcagggagtgttccggatgagcaacagacatactgccctggtttgagggttgaacagaagttggttccggagttgtacttggttaagtccgcagcggagattccacactttgtggccagagcagcgcagcggagccgagtgagacaaagggacaagatgccaagagttagcgcggaaacgagcataaacgagggcttggctgcgtctacaatgcaacagtccctggaaggaaggccactaccagtccatctatctcgtaatagtccgattcaggggctcagacaacaaaacaactcattttcgccgtttccatattctggccctctatcaacttgttccctccttcattactagcgaaagtagtgagatcctcatgtactataatgtatatctttccgaattgcctttttctggccctatcgcaaattctcgcgtgcagttgggcgattaacacgcgagggatcatggaagtagatttgattcttccgcgcaatgttacctatccccctcgcttatgctgccgatcatattcgccatccaaaatccgagcctcctcaaaagcttcggtccgatacttgaatagagtattgagcaggagaactttagtactagcgatggaagtattgctaatagaatcaatgccggcggttctattcgactgtggaacttcaatgattccagcagcaaccctcacttcctctattggagtcacgcgcggttcgatgttgaaggaaccttcgcattttaatgggggatccagatagatggatgctctcgagatccggagacagacgacgtgagcttgggaagatatggtaaacgcccccatttctacttctccaccaagtttggcacttcaccgccggattttgtcgctgtgaaagacgatgatacttgcgaccaatcgttagctcaggctttcaatttctccgatcttttggagctcccgccaacaaacacagttccctacggaccctcctgtctagcccaaccgcctaggctgcctagggttaccaatccttgcaatgtcagaatggactcaccagccgcagcaagtatctcggcggctttaacctctactgcgtgtgccgtggctcgaacaggggtaatctgcccaactccatctcctaaaaatgcagcctctaaggcacaattaccgattggcggggcatgggctttggtaatgagtacaatactcatttagggtctcgcatgattcatgttgactattccccaagagacttgttttttgttcttacagggacagttcgctcaattgcacgctagttgttgacactctcggaaccaagcaggtccgtccgccaccgcaatgcctgatatgatataggtccgagtccatcatatcagtatgcagtagtcaaccaaaaagtgggacaccctaggacaaaagaagtaaatgttatcttatagccagtctgatcaaacgttacatccacgattaaacaagcacgtgaaggcaccggtatattaaagcagtccaggaacggcatatttaagagaagcaccatcaacatcccagtttgttttctctctattcaaatccatgggttacaaggccgccatgatctctgccaccgttgtctgtaacttctccagcgtacctaacaaaggcgatacttgctcgtccttcgcttcatcctggggtcagactcttgcaaatttccaagctctgaacattagcatctcttgctcgactctcacagccggccaaagctgctgtgttgttggcacagtcaaagacgagccagcgaccacgacgtccacgataaccacgacggccttgacaaccacaacttccacctcccagtatgatccaacccagtctggcattcctcctagctgtgatggcttccatctcatcgcatccggtgaccaatgcgatacgattgaggccaagtacggcatcactgaggcccaatttaaggcctggaaccccagcattgatagctgtatgcccaccacttttatatcatttcctcttctgtatattgtcattcactgacgcttttttactagcatgctctaacctctggttggactactacgtctgcgtgcaaatcccgggcgctacaacaaccacctcgactccccaaccgacgtctacggggccttggccgcagatgcctggcgtcgcgagcaactgcaaacccttttacaaggtcaagactgacgataactgttaatcgatcaacacgactgcggccatcacactcgcccagttccgctcctggaatagccagattgatgccagctctatgtctgcattggactgtagttcaccagtcaccttttgtactgagatcctactatcctatgagacgtttccatcatttaaaaggccaaaggaagggagtaggatatcgtactcgcagagtgcctaagctgcgaaattaaaggaatacaaacagtgataagttagaacatcaaaaacacaaagcaccagactcgacagttgtgtctgcctacatctctcttaccgcctcctaatttgtataccccgcttttgggttgaactgctatttgtacttcgtatgtaaactcctaacaaaataagtcactcctgtcctatcttgtatcaactgcttcttcatccattaaggagttggatctatagaaatcagctcgaatataccttttctgatgaaaactaacaatgcatatattgttatatgtaaaccagaagtgcaaaattctgagtggtacccaatcaagaaggcggtactggaaattcaggcaggcgagcaacaatgccctaactatgttatatatatatttagtctctagtaaccattctatacgggctcaatgtacctttcactagtaatgagtgggtttactaggtcaccaggtcaaggtgatgtgattcccgcaaaaggggagagtggcagtgctaggtcttggcacaatgcttggcgacactaaaaataagtttccacagcagcgccaagaaccaattgggcgctcgtgacactccgcgccagcggaaacgacttggcatattgctccctagctggggagaacagaaacccagagagccttttcaacatcaatatgtcgagagactcttatgttctgtgatttaaagtatgcgttagaagatatttgagtacagagtgctttccctaaccgcctaagcccgggtacaccgggtaaggggggatcttggcattactacactctcatttcccaaaggacaactcgacgccaagcgcctgagaactgggcagtgctgagcagagctgcacccataacaaagtcaggcagcaggattggttgtgccaatgtcttggaattatcactctgtacataatcccgctggtacggcgcctctctgccaagtgactggtttcatcgtgatgggttccattgtctttttgctttgtcgttataggggatgcacactcatatttgcctcctaatcccaatgcacttaacctctgctctccatctcctagtcccatgcatttcctccgatgtcggttaccgctcagctcgcgtcaaatgaggcctgtgatcctttctaggtggttgaccacccttttggcctgccttctcatacaaaatgtcatcgcaattgacgttaaccctgaggatgagagtgtgttcattttgtaccctggctaggcatttcaaatgactgacatatacctctcctgacagcttccctcaaagatgccgccaagaccgttgccaccaccatgatggatttctacaatgaccgcgactcgaaagatattccagggaaattggacggtacctggtgggagggtggttcaatgtttatgaccctcatccagtactggtatctaacaggcgatacccagttcaacgacgccatccaggaaggcatgtattggcaaaaaggcaaaaacgacttttttccaagcaactactcccaatatctgggtaacgacgatcaagtgttctggggattggcggcgattaccgccggggaattaaacttcccagaaagagacggtgaagcctcctggatatctctggcggagggtgtctttaatggacagattcctcgctgggatatgactagttgcggtgggggtttgcgatggcagatctggccttaccaggatgggtataatatgaaaaatgccatatctaacggcggattgttccagctgtcagcgcgcctggcactatataccaagaactcgacctatgccgaatgggccgagaagatttgggactggagcgcgtctacaccgctgttgaggaagacctgggttatcgccgataccactactaacgccgcgagttgcaaggatcacggtgatcatcaatggacttacaactacgctacgtatatcgccggtgcgggctatatgcacaattacgcatgtctatcccctgtccctgacaagtcgagaatctcaattaacaggttttatagaccaatggcgccgaaagcaaatggctcgaaggcgtaacaggactgatgaagacatctgatcagtttttccccgcctccggtgcgaagcaaataatatcggacatcacctgcgagccaatcaataagtgtgatcgcaatcagaagaccttcaaggcctacttcacttcctggctcggattcatgtcgttgatagtaccatccaatgtcacggcggagatgatggggaaattcaagagctccgctgtcgctgccggtcagcaatgctccggtggaagcgatgggaagcattgtggagttcgatggacgaagaagacggaatgggatggaacttcgggcttggagcagcagatgtctgttttgggtgttcttaatgctgtcatggttccattcaaggcccagggcccttacaatgctgacaatggtgggacatcccaaagtgacgcacttgggggtaccaacaccgagagtaacttggagcctgaccctatcaccacaggtgatagggttggcgcgggaatcttgactgcgatcttcgttatactttgggtcgggacgatatcttggatgatttttggagacaagtagatacactcaactgtgaaggcgttcaatacatgtacatatattgggattttgataccttgagggattcaggctttatgataatttctgattctagcagcacatccactacaacagaaaaactatttaccacattcagggaacagcatcatctaaagtcgcgtcgtcaaaaatttgtgggtcaaatagagctttctacaagctctctgaaatcgtactgccgacttagtttcttcttacaatcattttgcggttctacctagagaaagattataaagagcgacttgctatggatggtgagagagctgagggagatcctggatatacagaagggcaagtatgccttgaatgcttagacaaccacaccaagatctttcccccatcctgtacagtgcagattttcttgttctcctcttaggcctcctaatcctctaggttctcgggcttcttatcacccttctgagccttgtcgtccttctgggccgcctctctagctctcacaagtttagcgacatactccttagtacgtagcaggcgcagtgtagctgcattagtagagatgccatagtgtcggctaacagcgcccatgtcgatctagaatatgatattacattagtgctgaaacataactgatgaatgagagatgaagtcaccttcattcctgtcgctttgatacatgtaagtacgaactcaagcctgtcttctagtatctcacgactaggttctgaggcgagcttggcaggcctcgagataggcttagcaatagcattcttgttagccttggccttgataactctgttggaagccatggtgaagatgatgctgatatgagcttgtttgatgtaaatgtaaatgcgaaaaatattgtcttagattacgggacctagggagcggagagaagaaggaaggaaagcaacgtgaattaagatcgtgaatccaatatatatcctgacctaatagcaaacaactttagcgtcttcttcgcatttcggacaatattgtgcgagacatgacctcagcactcagttgatagcgtaactacggcggaaagagataaaacacaaccaaaaggaataaccgattcatttatataatagaagagaactttgtgtatcatgaggctcatgtaagcttcgcagattgatttccgtgggataattagcagagcaatgtccctgaaagtttatatagcatccatagatggattgtgtaggtcaacacagtggcatgtccttctagataccctcactgatgttcacactctactgcctttacattcccacgaagcacttcatacttggcagaatcagaacagtatcgcccacattaagactaggcctggccatacctataggatacattatttcctactttttagcaacatcaatgcacaactttgttgctaactagctaggtaagttacgaatggaagtccggcgatggctagcctcagaagcagtcattccaaagttaactccataggtccttgcattctacgtgcacaaattaatcagcttacgcttgattatagaacgaaagacgccagagctattagtcaaacagacaagagtataaaaaagacattaaggtattaccctcattcccctaaactcggacaaacgctataaggtgaagtatcatattagcgccatgttcaaaatcatgtgtatactgcaagagagtcggagaggaaacgcttactagcatcaatctgctggatgttcggcaacgccaagcgcaccttattccgataaacagccggcccattcaattgcaacgggttaccctcgaagtaaacagtttgcagcttctccttatccttcagctcgcgctcaacttcctggaagctagcaagctgattattcgacccccacagctcctcgaggttctttagtgatgaaagatgttcaagatgggagacctggttgttggaaaagtcgagtacgcggagtgtctcgttggattccagccctgaaaggtcggttactgcattgtgagagaggtagagctcttcaagctttgggagcgcggaaagacccgtgattttggtgaggcggttcgattggatggagatgatgcgaaggtttgagaggctgtccaggttctgcaaggctgtcagcttcttagtttgttaaggtatattaggtgacaactgcggaccttcatttcgacgatcttgtttttcccaagccagagttcttccaacgcggtcagtgtttccaggttttcgatttcctgaaaggactcgtgtcagcatttccattgttcacctcgtacccagtatcatataatacgaacccgaatcttattcgcgcccaattccaagttcttgatttcggtcaattcctccaagccctcgatacgggagattttattctgcacaaagaaaatctcggtcaacttcttcagatgcgagacattcttgatatgcttgatcttgttgaagctcagatccaagcttgtcaagttatggaactcctccaggccgttgatgtgggagatgaggttatcgtagaggtcaagttcggtcagactggcggcgacattaggaggaaagttgatgcgtgatatttgattctggcgcatgcatagtctctgtatatcctagcgcattagccatctggataaaccaaagaaatgcctcgccgttgcacttttgtccttcgaggaaaaagtggtaccatgcccctctccgctaccaggcacatgcggattccagggccgttgggagtatgtacctgaagtttagggaagcgttctaatttaagagcagagattgacgatatccggcaatgcacgaggtcgatatcctgcagcagaagaacgattagcaataatgtcgcgcgcgcgtcgatcagcagagtccagggctatcagcctacctctgcattgacatcttcctctgccaatagatctgaatgtccattagtctattgaatcgccaatgaccgcgccttaagcaatcaatcatccagcgaccataccttcatcagcctcaatctcatcgaccgggggtgcatccggatccgagtaatctgagtcctccagcgcctccgggtttgtaataaccgcctttctctccattcgcatttttccgtcccagccctccttgttcttcatgatttcagcctgcgtgagttgtgggatgtttggtggtggttggaatcgcgattgcggggagcttttggcgtttttatcgggagacgatcgccaacgggggattccgaaacaagggaatccaaggatatggagttgaaagaacaaagaagtaataaagagttaagagaagaggttgcactgcgagtcaggaactgaaaccttggtttcgggaaggttgagctcaactggtgactacatcatcgtcttaatgcggatgcggaatggctccgagacacttgaacctatctacttccgtgtctgggttcttaatatcatagataagaaggtagtaattaatggattaaattcatctctactctaatagaacttgctccattttgttttctggatacgtcgtctcgggggctatatacagcatcgagagccgtgattgatcaagtacattgcatgaatgaatcactccgacaactttggcagcgtaaagagaattattaggcactgctcactatgaaggaaatgcataccactgccaggcagaggtcccagcaaaggagaggacacaatgaaatgcacgctcgtgtattggtgagctgagatcaacacaggtaaggccgtgtaccagggcagaaatgggaaaataaaagcatatgggggatacagcggggacatgataaccaagagacgcctgcagaatgcataagaagcggacttgttgggtgttgggatgggggagaatacacaaaaaaaggaagatcaggacatgagggggtgttggtaaagcacagggaagaaaaagaaacagcaaaagaaaaaaggggaatgagctcctcggagcgagtgagatacaaaatcaaattgcaatgcaaaaggtcgaggatggtcaggttaatgtgctatccaagaacgacaacaaatgcaggagacggggccttggcccagtaggataccagttccatctgggtccatgctctgtcgtcgagaaggggaatcggatttgaagtaggaaatagggcgactacccatcaatggcagcaatgctggaggaacgcaaaaggaaagggcttttctcgcgtagaaaagaaagtggaaaagaaaacaattcgctcaaaatggatatctcaggcgtaagaaggatcccattgaggcgactacagggtgcagtccaggaccatgctgacatcttggaccaggggccctgcgagatcctcgaggacagggatgagatcgagcaactcattgtcatgagcgtcagagaaccagctactgatgggaatcgcatgctcggggtggaagatgtaggatgtgggggaattatcaatgatgattgtgtccttcaagtctcgaccgacttgtgaaagatcctggataatggttaggtttttctcaatcactgaagaggactaaggagctcaccttgacgtagttcccctggtggttataacaactctctcggaataagcggtgatgaaccacgttgtgaatatcaagttgatcaagcaaagggtcgccatactattactcgagttagtgtgtgtcactcgccgaaaactatcaactaccaactgacctttgaaaccgaggcagtgaataccaccacttcgtaaagttcaccaacgcgcttcatgaatgcgtccacgccaggacgtttaatcacatagatgttgtgatattgaccttcgatctcaactggaatggtgaagtcggcacgctccaagacctgacaaatcaatgatgagcgaaatgatacagtaatacgattatacgcccttgggcgcatactgaaagcggagacttaccttgaagctgctgtgaaccagtgtttcatcgagatcaagtaccaagcactttcggccacttaagtgaggcaaaggcgcagggagcaaaggatgtgcttcgtcctcataattgcctcgagcagggggggccgggggtgcaggtggcagtggtggtggtggtggagggatcaccacggggagtttcatttcttgatgagatgtggcttcttcttgcccgtcagtgccaaaatctttagggatggttgacgttgatgcagaagggaggtcctcggtggttgaggttgattggccctccccattgtaagtgtttgcatctgctttcacttcaggtacagattccatcacgattttcgtttgatcgtgtggggtaacatccttggtctgatctttctggccagaaaattctggctgcgtggcatccacagaaggaccatcgccttgcacactagccatagcagggtggatattgcggtcttcttcgccaggttgatcggcgctgactgtggagtttgctttttcatctagatatggctcccttgattctacagtgcttgagtcaccagtaggaggctctaccttgtctggagtaggcaatctgttagaagcaggtggccgcatggttgttttctttgcaggcaaagcagtgtcatctgcatcaacatccgaagaggagcaacagcccaagaaagctagaaacttagatggacttttcttttgttgaggctttgagggattgtgaccgggcatagtcgtcgcctctttactctcctccgcattcactccgttctgagtctggcgcgaccgtcggctacttgcccggctgtggtcccgtttcgaccgtaggatgctcactttggaactcctccgagaaggctcatcttgcgctgcttcctcggtcttttccgactcctgttgtttgttggttctcgaggatcgtcgcgatgggatggggatcaacaaatggcgtttcttcggagcgttgacgccttcagcagcggtcggtgtgctctccgatggtgaagaggctgggtcggaaggtgcgacagaagttgcgtcctgggttgcggtcgcatcggtacctctaccctgttcgggctcaggacctacggaaggaacgacgttagcaattatatccttcttgggtacaataggtaaaaaggagcaagcgcattcacttactggatgagcccggaaggccggaggtgttcataagtgctttgtctgcggattccagagctgaatctcgcgctgtgccctctccactcatcgagggtggctgtggtgtcaggtgtcccgacacggataaatataaaaaaagagagtgaagcgaaacagttcccaggtctgaaaggccgattcaatgccagaactctctaaagtcgagagcgcggctaataggggacgttaacacgcctcctagataataagcaagcgctctgggaagttcgcacgtaccgcctttggccccgggagtgatccaacacccactattgcactttcgaaaacaacaagctaaacgaacagaaaagggatgtgatatctctatcgtttaaaggaggattttcggggggagaggagtgaagaggagtcgggggatgtcacgtgaacgtacggtgtgggaaaacgggggggcagaggaggaaatgagatttatttcctttcttccttttttttacgctaaaaagggctaacaaggctagcaaggcacaggggccctttttcacacgctactacaagccctcggcggctacggtaaatgccgacttgctatcacagtgtgcagagtcataccccgtaccgagtacttggccgattctactttcaccatctatatgggattcttcaagttcttcttcactctagacatcatgcaacaagacatcatgcaacacaggacccgagtccaaacaagcagaatccttttaagatgatcccggtcagggcgcctgtggggggatctaattgtggatattaactgtgattgttatgtacggccccttttttatgaccactcatatggccagtaggaggagctatggccttcaaaacgtgattaatttcatttgatgtgacccaaattagatccagtccaaacaccaagtcgtaaactgcaaactaggttgtacctagctgttgatgttagtccgagttctcgaggttcactctctagttaggttaggtttcatatcgaggaagatgaacaaagccatgacacaggatatcaaagaaaatcatacggactatgctgtagagacaagagatgacaagggtggaaatatcgccacttctattattatcaaggttggcttcccaaatttctggagttcattggcaggtcgctggatgaaggctgggctgcagaaagagtacagtcagcttccccacgtgagttgcttctccgcatatccgaggttcacatgcaatgatgcaacaaaagccccaggatatcctcaactttactttcttgtcttcaaatgcattctctatggtttggaatacatttaaattaacttcatggccttcggtcgagtctagagaccgcccctcagttaatccgtgagtcggaggtctcaagccatttggagatggccgtccagtcaacccttcggcgtccggaggatcccctcctgacattatatcgccattactccgatctcatacgctccaagttccaccgcacatccaaaaccacccgcttgattgcaacgatagcccttcttttctccatcatcggctcgggttatggaggctatacgtggttccgagcgagagccaaggagcgggcccagggtagccgtctattacgccgaaactctggtatccggggcaaggatggatctcgaactatatacgtgccatacaaggactccctgacttccaaggtcttgatccatcccaccaaaccgactacttttgacgctcatcgacgactattcctcaaccccccggcatcgagtcgcagcaaagatgatggctcagcaagccagatccctccccctacaaccaaaccaggtctgaatttggcattcttgcatcaattcttgagtttgggtagtatcatggtccccagatgggggagcaaagagactgggttgctgatgagccacggcctttttctcttgatgagaacatatctttcactgttgattgcacggcttgacggtgagattgtaagagatttggtcgctgggaaaggaagggctttcctttggggtatcttcaagtggtgtggaattggaacccttgcttcatataccaatgcgatgatcaaattccttcaatccaaggtgtccatcgccttccgcactcgattgacccgatatatccacgacctatacctaactgacaataacaattactataaattgatgaacttggacggcggaatcggtcaagggcccgatcaatttatcacgcaggatcttaccctgttctgctcggctgccgcatcactatactcctcaatgggaaagccgttagtggatcttttcgtattcaactaccaactttaccgatccctcggcccccttgccctcagcggcattttggctgggtactttagcacagccgtggtgctccggaaactgtcaccaccatttggaaagcttaaggcagtggagggcaagaaagagggggatttccgtggcctgcactctcgacttttagccaatgccgaagagatctcgttctacggcggagccgataccgagcgggtgttcctagtccgaagcttcaaggagctgcagcgatggatggagggcatttatagtctcaagatccgctacaacatgctcgaggacatgatcctgaagtactcctggtcggcgtttggttatctgataacttctttacccatcttcctccccgcctggggtggctcgggtggtgcaatggagttggccgatgtatccgagggtatgggtcgcgagcgtggccgcatgaaggaattcatcactaacaaacgtctcatgctttcgctcgccgatgctggaggccgcatgatgtacagcattaaggacatatccgaactcgctggctacacctcccgcgtctacggcctcattgccaccttgcaccgtgtccacgccgatgcgtattacaccccacggggctcgcatcccgagctatattctcttgcggatgtccaaggcaccacccacaacggcttcaacggggtccgtctagagcaggtcccgatcgttgcaccatccctttacccaatgggcggcgacgagctcatcgagtcgctctcatttatcgtccattcgggcgaccacctccttatttcaggtccaaatggcgtaggcaagtctgcaatcccgcgtattgtggccgggctctggcctgtataccgcggactggttagtcgccctcggggcttcggcctcgacggaatcatgttcctcccccagcggccatatctcagcgtcggcactctgcgcgatcaagtgatctacccgcacacggagcttgatatgcgcgaagctggcgagacagacgcagctctacagaagattctcgacgacgcccatcttggctacctgccacagcgtgaaggtggctgggacgctcgcaaggagtggaaagatgttctaagtggtggtgaaaagcagcgcatgggcatggcgcggctcttctaccatgagccgcggtatgcattcatggacgaaggcacttcggctgtttcctcggatgtcgagggattgctgtacgacaacgccaaggagcgaggtatcactctcatcaccatttcgacgcgggcgtctttaaaaaagtaccatacttataacctgactcttggtctgggtgccgaaggcgaggcctgggagttcgagagaatcggtactgagaaggagaagcttggtgttgagaaagaactacaagagctgcggatgcgtctggataaggtggacgagtggaagcagcgccgcgaggaaattgatcaggagcttcagaaggtgtgggctaatggtagtgaagttgcaccgccgccttatcaggaggcagagcactctagctctgaggctctaactggggtaacagcgaattaaatgtacacagttattggcaatcttgaaggcttctcatggttgaaatccatctcctatgcacagtagggatatttctcagttgagtgttatatcgggcgctcatgtggcctctgtcattgatgacgtagtactttaataacccgacatatttaccctagtggctcaagataatattagggacgttatatgtaagaacacttcagtgtctttttgtactccgtatgttctttctagatgtataaggatgattcgaattaaagcggcaagaaatatttacctcttaattcaccgccttattaaagcggcggtatatcttatcgataagcccatcacagagaaaaccatagttcatcctcacttgctttcttgtacagagcctctgctcactgtctgcggccggatccttgagctgtattgctgttctatctgatttatttcggtgttgctgagcccaagcccccttacaatccaatctgcactccttgaggcagggaagacaaccatgtcttacagcagcgaggatgaggactccaatgttaatattatccccatggagaattttcccagcgatggagacatgagtacatggccctcaagtcactacattgaacgctccgacttgcgctggcggcagttacttgctgaaaactggctcaaagatatgggcacttatgaagatggtgagttgattgcagatgcttcagattcacgttttgtttggcatactggctttgtcgcactgtatttttttccgcattgcatttgttgggtgactgcatctgtcgtctcatgctcattcgttcattcgctccttcgtgctttgtgctggcctgttatggcctctcttttctgtttgtatactttatacctctactctcagactaacagagcatatattaggtgtcattcataccattgagaagttgcctgatggatactgtctatttgagcgacctcgtgggactaatcctagcatggtgggcctttctggtgttcccatcttgatttgcagctaacaatcatatatgaagtttgattcttttctttttggtcatccaagcggtcggtattttcaatcacagttatctttcttgccacatttcctctctctggtcaagaacgagcttgacaagtgccaatgcaagccctgtggtaaaatgaagatgagcgaagggactgcagtgcaagggaaggcgggacagaggactagacgcgttgtacaaccaagtgagtactaccatgcctcttacgttagatcgtttattgatacctattgagtcattgatgagcgccgacccaccgatgcagagggaccagattactggcgaatcttgattatgaaattgaaagataagggggccctcgacgaagatattgagcagcggttcaattttgactgggtattgactcacgaatggctttctgattactttatgaaactggttctggatcccgcttacatcccccgtcgtggtgagcttgttctctggatctggcagggtctcgaagacggctgcttgatgcgcaaccctgagactggcttcattgagatatttggcaacgataataagtggcatggtgtgcccaattggcgtgccggcgtggtgacccaaatcccagaggacgaagggcatatggtaaatatcattgaaggctccgataatccacgcgggctgagctactctggattccgtttggagactctgccagatccggtgggtagtgataagtcttactcggtgcaatatgcctatgttccgttgcgtaacatcaagccttttaacacatggcaactctacctcaatggccaagagcgaggggatattcacccatctattgagaatgccatgactgttatgtcttcgtggagcatggttcacaaattccatgttattggcacatggcccagcgccaggatctactgcaagggaatcttcgtcggggccgaactccttgccttacacgacaccgtccgtctgaggccacatggattccatcacgaccagctcaagtacggaacagtcggcgaagtgacagacgtgatggttattgaaaaaatcgcgctctatctttcagagtgcatcgacgacaacgaggagcagctagccaaacacttcacagccctgatatccggtaaggtgttcaccactgatcctagtcgcgttacccaagaaggcccattccaaggcagaaacccagtgtcatccggcggatcagcaactggtcctatcccactcactacggaagaagcaatcgctaccttccgccaggtcggcatgggcgactacggtccctggtaccgtatggccgatggtagaacctgcaacgtctccccacaccttatcgtgggtcgctgctacgaaccgctcgcggcagagcttatgttcggcacccatacaatgagttacgatctatccggcgttatggaaggtcgtcagtactcgtcacaagtcgattcgcgtatgcccgaaggcaagacgtggttctggggggattgccgggtggagacgctcggactgacagaaatcaacggtgtggaatgcgggcttacagcggcgcagcgcgaaaacccgcgcaagtggcaggcaatcatcaaaatatcacacggtgaagtcggtcacgatctccggggccaggccgagcttccttcttctgtcggccgaccctccaagtcttcttcgtccgctccgaagggtaccagctctcggccgagaactggtcttgagcatattgcgcagacgagtaaactggtcagttctgttatcggcagtgtacccgatactgaagaggactcttttgatgatcaagtgtatggtggtatctctgagctagggattggggttggtcattcttcgggggaggatagtgattattcgaatgagtaggttgattcgatccgatgtgcccgttgttttccctccttttagcggcatattcaagatacccatgggcgttacggagggataattctatcttgaccagatgaaattatgtgcagactgtacaatgttcaaatagtagtgtatcttattatcccacagctatgtaatcctgcagaacaaacagagtcaacatctagaagaataagcgtaaactacgaagaatattattgcaaccaatatcttagaagagaaatagattccatggctattgctttcatgtctatgtctaaaaactgacactcatataagaccaaatacgccttaaacctcactctgtccagcagaattccgcctagcgatacgtttcttctcagaccaggggaagtgaataacaggaggcagaatgaagctgttactgttatcagcaataccagcaaaggcattataccaagctaagaaagcaccaagcagagcaaagagcccacccgcctttatcaatttctcatttggcgcaccatccacattgaaaaggtacccgagggagagcaagagaatggcgatgtcgacgaagaaaaagagggagaagaatgccaaggtggatttgagagtgagcatagtgatcattgttgtgaagatgaaccagccctattgagagtaagttagttccaatctccttcttcttgcccggaataacatacgaagagatacaatgcaaacgaattgtaaaacatagcgggagacccattatccgcttcttcaagggcccctatgatatcaaatccaccggggataaaagtaatagcaagcgacatccagaaagcaccgtaagatgagagcacagtggcaccaaaggtattgccaatcgccatttccctggttttgttagctaaagcccgagtattcatgtccataacatgtctgaaacataccacatgccagccaaaagctgcacaaagccgccataaatcaatgcaggcccaacgatgatattaggcgcagtaatgcccctgacgttcatattgagacatcccagcacaaaggtggtgagtgcgaatgcgcacaggcctagtggtgccggattggcgagcttgcggtctttggggatgcggtatagacctggctggagatcacctccgaaggcagggtaacggctcgaggctgtgttgacgtgggctagggggccaaagtggcctgtttcatagtcgtcattgctggaggaatagttgtttgtatctttggcactgatatcttcttcgtgggacattataggttgggggcgtgaggtagacatagatgtacagaagagggaaagggggtatatagttcgagaggagggaatatatcccggatggcaatgcaattattctggacaaggttgacaagtttgacaagaacaattgcgagttcgttctgctttatatattgcgtagacaagtcgtggacaccatgacaccaccacgccccctcaacacatcatgatcaggaaacaaaattcctggggaagatcagcgccagtgcgggggcggggccagcccgaaaaagagtcttcggaagcgagaatagaggcgacaatagggggttctgctggcattgctagcattgctggcatcttggcataagagtaccccgtagtggagacaatatacagttccatccgtccgtagatgatcacattgcgagtacgagatcgtgatgtatcgagtaaagatcaacacgtaagactcgttctgagcctagaaattatggggaaatgcggagatctcctaggtggtagatcttggatctgtctataacagggttagcgagggtgactgtgtggggtttcggttccacctgtcggcatatttagcatctctagcactggattatagtgtaaatacttggcagaatgtggaaatctctgtcactgcctagattcatgtgccaagctggtcatcggggttcgaaacgcgtcactcacttttcctagatccatccgggctgaattcgccccccgggaaatccgcacgctctacggaaaaaaaggacaaaaactcaatggatgatttagattaacctcgttccaatcaaagcacaagctagaaacttaaaatccttaaactactcagtaattcttctgtacaacaccccttgcaaactccgcaaagctcaatccaggctgaacttcctctgcaaggttcggctgcgtgaatacagcaagagtattcctcgcaatcttctgcccaggactagccttagcccctttgacaaaatgcggcacggccataaacttgccgtgcgtgattagctgcaaggcctcaccagtctggaaagccagacaatccttcggaatgttgactttaacaatctcatcagtgcgggaacggatgtacagtccggccgaagggtcgggggaatggggaagttcagggagaggggcagatgcagaccctgacggatcgagacttggaggcgaagcggcttcatcgaggaacatggccgatgtcaagcccgtcaaacagccgtggtcaaggtgtgtagcgcaccagtcgtcatcactagtttcaacctcttcttcctgattagggaaataatgtaacagccgtgccttggttgtcaggctggttgtcacgacatggtgcagatacccaggcttgtagccttcgatgttggcttccgcataccggtcacatgccttggcgacgagtgccgcggtatcaatgatcagcccacatagtgactccacgctacccctgaattcgggtaatttggctggcgggggccagatgtttggcgcggtatactggggtagatctgggaaatcatctgccggggcgctgtctagagatgcatcctgatagaaggcacagttcacgtaatacgagccctttaatgtatcgaaatggcctgatttcagcgtttctttaccgcaagaccagccgaccaagtatttggactctgggctggtgagggtttctacatggaggttagtctgattttgcggttggagtcgggtggaggggcatcttacctagttcgggatcagggagagccgccaaatacgaggcattggagaggacctttgtgcgcaagtcgctgaaggtcgagggcaggtctttgaccacgatgatgcccaaagaggacggcccaaaggctttggtcagagtatcgaaggagacagttcctacaaaacttagcatctactcttcttcttctgttcttctgttcttctgaacacataacttaccatctacaagttcatgcagactgacggtgacggcctcggccgtgttggtctccatgatgttgtagaaattcaaatcaacttccccgctctcgtatctttctaatctcagagggcagctcttcgcctatctgccactaaatttcacacgatgttacttgatgcagggatataaataacacatccaataggagtcgagaattccatatcgtcccattcttggcatatcgtacagaccattactattacaaaagccctcactcgctacccgactgtccatgtcgtctagtcacagcccgtagattaccaaatggcaacacatcggtaattcgcttggcccccgtgaaaagcatacagagacgatcaaccccacaaccccatccaccggtaggaggcaaaccccactccagggcttcgaggtagctctcatctacctcgccaggttcatcagcagccttgctaaatcgtagctggtcctcgaatttgcggcgctgctcaaacggagagttctcctcctcgtatgtattcaccacttccttgccctcgataaagagttcaccgcgtgcggcgacgcgctgcttggtcgtcgggtgaacgaaggatttagagagtggggagaggcattcgggtgggttgatgatgaaggttgggttgatgcactgtgattcgacgtagatgctgcatagttcgtcaaggagtcgcgggagggttgggttcgttgggagtgggagggagagcttggtgaagatagcgtatactttgtctagggcgtcgggggattcaaggtcaggcagtttgtgaccagtgccctcttcgatgcctataaggaagtcgatacggcggaatggtgccgtgaagtcggctgtggtggggttaagagtgcctgttgtgtttaaggcgcggatgtgggctgccattccggagaggaggtcttcggtcatggccattagattctcgagattggcgtatgcatggtagaattcacaggtggtgaattctgcgttgtgtgttttgtccaatcctatatctcatcagctttgttagacaggcatttggatatctgtttcaacacaccctcattgcggaacgaaggtccaatttcgaagatcttgtcaaacccaccaaccaccaaccgcttgagccatagctccggtgcgattctcagcgacagctggcggtctgggaactcggtggcagaggtatagaacggacgagcaattgcgccgcctgccacagacccgatgatcggggtactaacctccataaaggatcggtcgataaagaactggcgtagatactgtaccagggccgcgcgggctcggatgatatcggctgtcgcggggttggctaggaactggacatggcgagggtagggagaggtctcgtgctcaatgtcgtgaatggggacatcatgcagacacggcgagagcagttgcggcaactcgctcacatcgatggtgagctcgcctcgtccagtgcggtgcggtctaccggttacagctagaatggcatttagcgacactcgagtcaggccggacggagacgagacatacagaaagcgtcgccgcgacgcagaagacgatagaacttcttgaagtcctcgggagagacattctccagacgacgcttgttgcacatcacctggactttatggccgtcctgcacgatatcgaagaagatcaatttgcttccggcgagtctataggtacggattcttcctactattctaagtacatgggcattgtaaaggccagaaagcagaacctaccagagacgatgactgtgtcttctactgaatcattgtcggcgagctcggcgtagcgagagcgaaattcggcgcagctcagtgtgcgtgtgtccaccgctaggcgagggtatgggtctgcgcaggcatctttgatctgctgtacgcgatcctgtaaagccttctttcctggtaatactgcagagctatgctttcgaattggctgtgtggttagtcgtgatgtaaagaaagtctgaatgcgggattgtctagcgagtcgcagtcctgcactaaagatttgggttagcaatgttcgagaaaattgacattgttgatccaaattaaagcattaagctttgtcagataaaatccagtacgttcagtgtccaaaaggacatcactgtagcggttctaatgcggggataaatcatcatataaggggcgagtgggaattgagggagtaaagcgataaacagtaaatgcaagtcttacctgtttcgtaggccaaagccagataaagcccatctagggcgaattgaaagcatagcaactgccaatggctctcacattgttaagagaagagaggaagaagaagaagaaacggcagaaccgagtttttccacgcgggtggcccaagcttctccgacctcccgtgctccgaatacgttggactttctggtgctctactccacatatctagcctcttaaccatctacattccaaatctactccaaacacatatacatcatgtctttcctcttcggcggtgcccccaagatgtcctcggcagagaagatcgctgccgccgagacagaagtcgagatgatctcagacatgttcaaccggtaagttgaagccctacagaatacccaagcgctatgactcgattcaaaaaccagaagactgcaaggaatttcattcaacccatcttcgaactatatatatgcataacccattctaacttgttaccgtcgcgatcatagcttgaccgagtcctgcaccaagaagtgcgtccccgccgattaccgcgaaggcgacctcaacaagggcgagtctgtctgcctcgaccgttgtgtgtccaagttcttcgatgtcaacatcaaggtcagcgagaagatgcagggcgaggccaacgccaacaagcagggtggcggcttcatgtaaacgtgttgacaacgagatttcttgggaaggagctctggtagacttgaagctagagagctcggtggtctttgtttctgtgtaaggctatttgactggttcggcctgctgaaaccgggcctgttttgaatgatggttcacgtttataccatcacggatggaaggtacgatcgccggtctatctctgaatatgtacaatatggtggatatgggaaaaacagagaatgaaaaaggaaaatatcatacaagtgtcgtcgttaggtcagaagcccatggatcgcgctatccatgcggtccaggaagtatcgtgctgttcctcgcctttgaccagggctttgattctcatctcgacatttacaatgtgacggtcaaagtcgctcaggccggcttccatgtcctcgaccttggactccagaacgtgtagttcgtagtccagtttggcacccagcaactcgacgcgtttcacgccatcggcgagatggtggctttcatctatgaggatgtcactagatcgttcgcgcaatctctggtagtcgccaaagcgttccaggtagactgagttgagctcctcatgtcggtcacataggagttggttgagaccttccacggagtccacttgtcgttcaacccaaggcacagtatgctggctcaactcttgaatccgtgagctgaaaatgcgtccctctgaggcaagcatgtcttcttgaacgatagcctcatccaggttattagtttctttgaccgttggtttcccacctaacggctcccatttgaataccacttcttcaactatgctgaacgacaggtgtcgtgcgcagaagttgtctcgccgttcaagctcactttcaagactttggaatgcttcgcaactttgcggccgccgcagggccatgacagctatcccgctaatcgagccgtcacggtcacgatccgttgacgctgccgtcgaccgagatataacgcgttccatatcggattcttcctcgattattggagcctgctgtacaatgggccagtcttgagcttgtgtttctggctcatcttctggcacaggttcgatatggatttcaggagcttttctctcagactcggaaaaaggggacagttgaggtttctcttcctcctcaatgagcttttcgatatcgtttgatatctttctttctgagcggaacccagagtcggttcgtgtttttgttgacggtgcctcgttatcactatcgatggacgggcggtatgcaagatcgtgtgtcacctcggagctgtctcgtgaagaatgatgctgatgatgatggcgctgccgtccgactgcatctttgaaacgtcctagccctgctcgcgcatctgaaactcgcccactgacgcccttctttcgatgatccttttcttcggcgggcggttctggcgtcttccaagagcgatctagcgcggagctcgctcgctcggcatgtaaatcctctgtcgaatgctttctgcgactggtccagacataaccaccttgttcatcggtagtaaacatcatatccgatccagttccccgggtgaacccgtcttcgacaccactcttgcgcggtttacccagccacagccacttggctctctcaccattgcagcactgaacaaaagtgtcaagatccagtgtttcgatatcggcaataccgcctttgtcgcgcccgcggaccatccccataaccatttcaccaccttgtccactcagctccgccatggttgacttcactgcatcggtccagccttctgcgttagcagccttggccgtgacacggtgtaaccggtccaatgtgagtcgatccagtcttcgagaccgcttcattttttgagacttttggaacccaccaattcctcttttcagactgtggaagtcgaatgcgtctttccccactggggcgccataggcgtgcagtctatttcgagccccaagcaacgtgcccagcaatgcagccacgctagtgggtcctaggctgctgtcgcttggctcaatgttgtacaggtctgttccgatatctgtccaccaatcgctaatagctgcctcagtcacatcacaaagtagcccgtccacatattccggggctagcttgtcaaacaccatcaaggcaatctggcattgtctgaccaattccatgaccgcattgtataaaggaaccctctcgcttgttcggtacaactgatgaaacttggcttcggtcgccgctgagggatgttgaagcttcaagcccgcgcggcctgcgcacccaagtctttttaagtcttcattcacaatgaaatcctcccggtgtttcttgatgtcgccgtttggtattggaataagactcaaggcagaaggaaatgaggccaaatcggtaaccatgaccgtccctagtggtgtttccttccttctggcgtggcattgcttcatggcgtcaaagtacatccgcaatcgaggcgaccatgtagtttcattggtcggaacactcagtactcccacaatcaccgtatgcgaagggtcaccggtataggtcgaaatgatgaatgtcggatgcacgcgagagcaggcccattgctcaacaatataaatttcatacccttgcagtgttacacgtcgctggagcacatcggtcgaagggtcttcttctaggtatcggagggcaaccgcatcagtgaacacaattcgctggtggccttgcggtgagggacgttcggctccagttgcgtgagaggcggcctccgatggcagagagtcggtacgatcgaccggagggacattcggagcgttgacctgcatgatggctggtctcctgttgggctcatatgctaaaggaacaagatgaaaatagcgccgaccattcaacccaaccttaaagtagatcacctctcctaagctcaagatacgaagggagtgccggccttccttcgatcctcctgcactcttggtcaggtcggaacagttgtgacatatccaggcaacagggtttgaggcatagcatgaacctgaaataaaaggagaaaggcaaatgtattacgggcgaacgccttgagaaccgcataaacccccgaggtgtgcagaagtggcgacgtcatttctgtacctgatggcggacggatcatgtgaccatggctgtctggtgttttagcctcaggcatctatgattgtacatctcccctctttaggatttaacagctttgaagagacctcgcgacaatggtcagcgctcccaagatgcaatatatctctgctaaatgctcaagagaaaaattacgaggctaattattctccaataagatctcttctacaatgaaatctctctccaatatatgacgtctgtcgggaaattacatgctaactcttatacagcaaagcgaatacggcatcaagaagaaagaggcaattctcgaaagtcatcaccaggatgctcgtccagcgaaatggcagacggatttacatttccgatagaactatgcatgttatgagcctatcaattcaaagcatgtgctcccaaagctctaggatatccacctccagtcacctctgtcctgctatttagcgtccacccggctgtataatagtcagcaaaagactcatgtgagtgaacgagctatacatactcctccatggggaccaccgggtccgccatgtccaccctggtgttgtccaggaccaccctgttgtccgaaacctccctgaccaccaggtccgccggggccaccctggtgttggccaccttgctgctgtccctggaatccaccctggggtcctccaaacccagggccaccagggccaccagggccaccctgctgctgtccttggaatccaccccgggggtctccgcccggaacgcccgcgcgcccaagactcatgtgagtgaacgagctatacatactcctccatggggaccaccgggtccgccatgtccaccctggtgttgtccaggaccaccctgttgtccgaaacctccctgaccaccaggtccgccggggccaccctggtgttggccaccttgctgctgtccctggaatccaccctggggtcctccaaacccagggccaccagggccaccagggccaccctgctgctgtccttggaatcccccctggggtcctccgccgggaccgccagggccaccatggggaccgccgggaccttgctggtcgccgtggtttccgtggttcccgtggttctcgtgctcgtgctcgtgcttgtcgtggtggctgaagagacccatggttgatgatggtatgatgaagtggggaggtggtagattgatgaacagtgagatcgagatgttatttgagtgtgagtataattctggaaggaaaaggatggaggggttacagctgccctttataaagactgagtggcgtcaccgatcagaatagagctaagacgctatgagctgaacctagtcttagacggggatgatggcatcacatcacgtacgacttgccgatgtggagtatcagaagcctatgattgggacgtgctgggtatctcctccacttggtaagagtatcgatcgatgaagacgtagccagaccctagatcgatttgccgttcttatttaatctattgatcgactccatcaatatatatctgagtatcggtagagttccagcttgcagctattcagtgtcaattccaatatgaacagccaactttgtaacataatattagcatttgcagattatctttgggggcctgtcgattgctgctcagtcttccgctgctgggcttggcgttgtcgatgcgtacgtacgcctctccacagctccagccctactccggactaaccatcttattgccaaaattctatcgcccaaacccaagagccgttctcggacttaattgccggtatttttttagcgtcggtcgtagtcatcataaacagtaagtgggtgtcaacctccggggccgtggaccaaccagcatgccagatgggcacagccactgtggcttgttcgtaccgccacattataggtccatcagctagccaccatcgggttaactagaccatctttgccatcatcggcgattagacagataaactacaatatagggttctgacagattataatttcaactacggagtaagtcctcgctatgtaagtaacccaacaccattcgggtgttatagcttaccacaccatgacggaaatagtggcaattgtaccttttgttaaagatttgcatacaaaaggcacatacggctcatcatcagtttctcgactctcgaaacagataggaaatttacagtcactatccgaggctttatattttctacaatgaacgatccataaagaggtatcgtatagctatagcgcgaactattgttgcaagttgttcgaaaacttcgcgccatagcatattggaccccctgcctacggtttaaataactagtgaagagggatatgtggatatgcacgatggacagtctggcctagcagacaagacgagagcgacatagcaataccaaccatccagggaggtcagctagcaagcatggggatcacacagaccgtagtagaaatctttatctcctaatacaacaacatcctgtaagctcctttttcattctgtaagtggtgactggtctagattctctcctctaggattctatgtagttgacatcaacgccccgatattctctccacgcctgaaaggtaaggccactacttgaggattccgctttccccaccagtaccgccttccttattaggtgcgaccttgtattctgccatataatctgccacaaaagacatgcattttgatcagaaaaaaaagtatattctacctgattcctctaaatttaaccccttaataataaagaagttgatatgacagcagttactttattttgatacaggattacatacaaattgcgactgtcttgctactacatatttgacgaaagtgatatataaaaatagaaggcggtgtgaagtgcgatagatagaagtgtggtacccgaatggggattggttgcttggcaaggaccgggtctcgagggaaatacattagcggatgttgttatattgggaagtcaagcaagtagactgtcacgtagttataaagaaaaaaaagaaattcttggtattcgtctcacgagcacagaaatatatatgtacattctaaaaaggtcgcgaatcgaatcaacgctataagttacaggcaagcgtctatacaataggacgtatccagccacgggctaaggcaaggccatgctcatctggactggttgatatccctttggattgtggagattcttgtgagcggatggcatcagatcgacaatcaaagagagaatataaccggtgaagacaaaggcgatgactatggagcggattagtataatatcaggcagtggacaggcgaaaatcatatgtatactcaccccattcaagagtagcagccatgttattctggttgtaatgggtatgctccgtgacccggaagacaataatgagggcaagttcaacgacaatgaacgaggatttgataagaaaacttgtcatgagcatgggctgccgcagggcatgtgcgatgcccagatagatataatccaagcacatcaaggccgcgctgacgagaaacccgacgctggagctgtcagtacattgtgacttaagaggtataccggatatatcgggtatagcggtcttggcgagggacatacataaagattgtcacgcagacatcgtgcatgaaatggtgggcgatgttgtcgaggacggatagcataatcaatccgatactcccgacaactgtgaaaaggaatgaaccgtgcgtgcacgctttgctgatgtatgacttgttttgaacatgttggtagaaagagaggtttagaagtaggactgttgtgatcgatccgatcatgaataagggttttaattcctgggctccaatatctgaaatgaatctgttcaaagatgttggttaaatcttggcatgattgaggatgaccaaagaaggcaagtgctcacggtatattctgaccaggcttcatcaagccatatctcggttcaccgatcatagtccagtggcctaacatagtgagtagcattgctaaatccaatgttagcatattgctcaatgcgatcgtggaaaattcaagacctcacctagccaagtggacgcggctacggccggaaagacccaggaagggaggaacattataatgtgtgcgtatagctaaagagtgtggtttggagcagcagtcatagtcttgttataacgacagtatcaaagagcacgggctggtgaagttggataccagccacatctctttactcaagtagttgacaaagagagaaagtgatccatccttaggttgggaatcaggcaacaaatattgtgcctgtcgatccctgcccctatgacgagggtcagttatggtatgtgggtctattaaggaattggcaaccccttgatcgttgtttcgtgtaagaagcacatgtttcgtacatgaaaggcacaagccgggttacagaattagcacaaagatggtgtatttatgtcgctttcatgaaacttgggaggtagataatgaatttggcatgctttgactgatatctatgcgtagaatgaaaaatcagattgcttgttgctccactgagctccataaaaaaaaagggaatcgagaacctggttacatatcctttagtaccattggtggggccggggctgggatatgtttgtcgacattgggaaagcaaagcatcatgtacatcgcaccgtttcgcacgtatcaaatgtggagatggaagtgatcgcctcgtggatgatcaaagcttgtattctcactgtacctgtcgcctgtagtgtatcagagttgcatcaaaggccaacgtatatcccttggcgaggatggaagggaccggggtctggaaggaaagtcctatgagcatttcacggatctcaaatcccggtgtaaagacgagagcaaccgagagcaaccgagaacaaccgccgctcccgtgactacggttgtacctgtaatatgatctcaggtaccgatttgggagagaaaccaataagcacggagtatctgtcttttgatactagacgtgtcaaaggggcatatgtgaggaagcagacaggttaagaggtgggacccaggatacacctacatgagttcgatgctcatgatgaggtatctggctggcacgttgttccgacgtttcaacctgttttaacagcacggcaacttcccggtcggacaaggggctggggtctgctttgttggccggtagggaatgcagtcagtagaggtacctagactgaaaggtggctgggagatgttctagtgatatgtcagtgactgtaattccacgacaggtccatggtttggctgtgttggagctccattgagatgaaacttattgatagcgtggtgttcggttcgaccagccggctgagtagacaccggcaccggcatggagtagccgaatgtgtacaggagtacggagtagagagtggatgaccgaggggtattacatcagtggggcagtgttgaccctacggcgacatttcaaccaaaaaccgataagaaacgcggatgaagatagtttatctagcagtgcaaggagtttcaaggagagaagtgatggcagcaaaaacaacttcaataaagactgcccaggtggctgccgtaaggggggaacagtgggccggctggcaagggcgaaatgtgatgcgacttacggacgcgtcagtcaggacgcgacttgttttgaaaattttcttttgaagtttatggattgtctaacaagatcatggaactatctaagcgttatctcttctctaagagccaccgacatgggtagcaagtagtgaaaagactcaagatactcgagggtgaccgaagtcgcccatcgaagaatcaaattcaaactcgaggactcaagagtcaaggagttgaggcagtaatgtttcaaaaattcccaagcgtgcggtaaagctcgcttgaagcagtcaatttggtagttttcaactagcaaaaacacgatctcggatgtctcctcactgatacgtgtaaaacccatgcactaggatgaagaagaaagaaaaaagaggaccaagtttgggggggagaccacctatttatattttcctattggctgaaggcagcagcaatgaaaaggtaggtgacgagctcggaataaaggatactccgaagcaaaatagccgtgtgcagccgtggatacccggaaatatcggagttaggcggagaaactatgaagccgaagctagatgtgatatatggacgaatacggaaggcggtatgtagtgccaaaataacgcccaggttacagggctacgaaagcctacgatgctgatgtagggtacagggaggcttacatggggttactcaccgggattcttggcctgaagctcaccaggcctaagtatataccaagctatggagtgtagattcgaagaagggctgattcttgtgaaatttggtgttaatgcgaggtggctgtgtaccggaagctggaaatgaataggataatttgtatgcatgtatgtagtgtatgacttttagcttcatggatggaatatgcgtgctcatgctgctcatctactatgtaccaggcctgggcaagattccctattgctccataatcacttgccattcaccttcggaggggttgaatcacgtggaagatcaccgggaacagcttgtctctcagttcgatttcgcccggttttctctgacggttgtctctatttcgctgcatcgttttggaacaaagatttatattgcctcaaaattttatatattgcatcccgcgccgagataaagagctcttatctgaagttctccacatggcgagactcggtaacctctccagtcacctccgagcatatcaaccgaaacccacctgcaatggaagtagtgcagaaagaacacagccgactcctcaagaggaccgagggctctcagggcatcaagaatgttcagtctgcaatcgattcacttcagtctgctcgcgatgccatagctgctggtcagtagtaaacgtgccccgccaggtttctcaactgacgacgtcgatttctccccaaatagatccatccactgcctctgccactctagccacccttcacaactcggttaaatcgtcctttgactctatcaatgccagcttgaaagagactcacagtggcctcaacaagtacaccaaatcgctagataaggtatccagaatactgatcgtccatgcgttgctaccaatctaacatctggaacagctgtttaaagatcgaccactgcctagcaccgacgacgatgacctctcttcacacgaaaccctgatcaaccgcgctatcgccatgcatctccttcgcgaaggtcagttcggcgtggccgccaccttcctctccgagattgccgaggagaagagaatgtatccagtctcccagaacgagcgtgtaccgaccaatacaactgcgagcctgctcgatattgacgaagtcccttcgaccgagatccggaaacaattcgcctcaatgtactatatcctacaacaactacaagagaacaggaacttactgcctgcgatcgaatggtcgagagaaaaccgcgaggcgctggaagcccgaggcagcaacctggaatttgaactctgtcgactgcaattcgtatggctgtaccatggcggagcgaacagccagggaaccgcaagcggatggctagcagcgctcgagtatgcacggcaggagttccatctcttcgtgcctcggtatttgagagaagttcagcagctagtgggcgcaatggcgtactcgtccaacctcagcgagtcgccatatgcagctctcttcaacaatactagctcggcctgggatgacgtagctcacttcttcaatcgtgagttctgttcattgctgggtctttcggcggattcaccgctgtatattgctgctacggcgggcgcgatcgctctgccgacgctattgaaactacagacgatcatgaagtcgaagcggacggagtggacttccgacaacgagcttccggtaaggaaaccgctactctgtgtacgaatcaacactaatatctgtattttcaggtcgaaatacctctccctccccaatatctcttccattctatctttgtctgtccggtttcaaaggagcaagcgaccgatgagaatcctcctatgatgatgccatgtggacatgtcattgcgcaggaatcgttgaaacgcctgggcaagggtaaccggtttaaatgcccgtattgtcctagcgaaagccaccccaaggatgccaagaaagtattcctgtagtgtaggtctttctctttctttctctttctttctctttctttccctgtcctcatatctctgggtatttttctttccatggcaaacgtcgatgagacacgtcttcagggagccgggtcttgccaggggcgttagcgtcggcgttcaggggcttatatgttgcggcattgcaatgcaggtccattcaaagctgtacgaagcactgcaatttaattcaaacctgacatcgagcataagcaagttcaaggtaaaataacaatctcaccatagctgtttcccaatggacgtatcaattacaacaaagaaaccatcagaatctgcgtcaataatccacaatccacaactatttcccaaataggaaataccaatttcctttgtctcgatggcggcatctgattggccaaatctaggcccgtgaccacgcgccgatttggcgacttaaaaaacccctttacgcggtcgaaactagctgtgacgcgtctttcgccgagccctacccctctacgctggctaatgagagctattcagtcgatcatctgtatgcaacccgtcccacgtcctgtaatatgctcagaatacaataatagatgtacgatgtgacttgtctccgtaacaaacgggagcttgtagtcctctctgtcttttataaatactgccacatctgcccctgaatccatccacagctgtctctatattatccccaatccagtctcctatcctatccagtccataatataatagcaatgttgtccaagagaacaccagagactccaattcctggccggtatcgcgcggcaaaagcttcagctttcacgctccagtcgcgccgggttcctcgcgacagaaccaaagatcgagtgcctaaggacaaagagcgagagaactctggctctggatctggttccggctcaattcggagtaagactcgacgacttgagcagcgtcgaagattcgacaaacccccagacgtaacgtaagtccatgcccatgtatctccatctccatctgcgtctacatttcatcatcaccatcatctgcaccaccaaatcattaatccaaccgctaacccgacccccagaacacccccaacaagtccaatagtaatgctccgcgtgggccccgaaaaccgcctcttcgccgcccacgaagccatcctctgcgcatcgcccttctttgccacgcactgtacagcccaaacaccggacccgaatgcgccacggcctagactccccctccaaccggcaagcaaacgcattgacctcccagacgagcaagccgaagttttctcctgcgtcctcgagtacctctacaagggcgactactacccgcggctgcgacacaacagccgaactcagacatgggagctggaggacgccgatgccggcgttggcgcaggcgccagtggagaattgggacaggcgacggcgacggtgtttcatcatcgagcgcagggggtgatattacgggatacggctatttagtaggttgaattttttttcttttacttattctcatctggctatgaatgtgtgtgtactaatgtatgtttcgacagctgcgcagcagagaaatacaaactcccccgtctccagcgtctcgcgctgcgtaaacagggcctgcacactgggatccagtgcagcacgatacttgcaagtgctcggttcgtgtacgaaaacacgccggatacggagtcgaagctgcgggcgcattaccttgcgctgattgtgcggtcgcggagcacttttatgcgcagtggaactatgcaggcggagatggagcgtggggggaaattgttttttgatctgtttgttgctttgtgtaatcatatggtgagtttacctttctttgcgcttggggatgaggtgctaatttggtctacgatataggatgaccctactggtcagtcggttgatagttcagctgttaccactcattgttagggatggtcatagttccggattaaggtgggttgttggctttttgactaatcgcgcggttttcgtcattttatatcgctgctggcagtgtttcatacccgtgtaccactatgtttcgatacctacagaatgaagagtgtgaatcaaggtgtaattctcgaaatgattgattcgtaaattcgtaaagataggatctaatatagtccagctagcccagttttgatatatctcgtgtaccaggccagcgtgaactggatgacactgattaagctggcgcttcgatccggccgatgaccaagtagttgctagtgtgcaatttgtatcacgtcaggccaaaattcttcggcagcggtgttagctcatgagcctgagtatcctggtatgtcgaataatatagctgcatgaatgtaagtcataggcggatgtgtgtatacctgaccattttgaaggtcctggcgaccaacgagggagttgtccatgagcattagacgaaatgaggttcaaacacgttgcagtgcattgccacccaaaagcgtaattagacacctgtgcccgggaaagcacctcccttgctcaagacgatgatgcctcgatcacgtgcgatgtatcctttcatgagtccctaaggaggcgacatgtcagtaaacacttacggattgattatacttgtcagcctaccttgtagatgagattggaaagcagacactccacctcatcaatatcgatgcgcgaccggccacttgtagaagtacccacacggagagctgcggcaaattcattcacatgcacacgagtacgccgaaccggagattgactctccttgggttcgtcgaaaccaccagcgaggaaaacttttcggaaaaggttgcgcaaggcaatatcacgtccacgttctaacggcaggtaaatacgtctcttgacaaactcttcctcgccgtcagacatagcctggtcgaatccaaccaagtcgccttttcggatacagttcgacagagaccggaaaagcttctcgagtcgtgggaatggcgcgagaagttccttggtggggagcgtgtgtgtggtcaccaggtgacagggaataaggtaggtaagaatcaatctgatagtggttagtgaaagcccatatatagctggagggctactgactctcgattcttggttgcgtctcgatgacacatcttccaagcccacgttagatgttcttcagcctataatgcaaataatcagtcctggtgatggtccacggacacagctcttgctaatacctctgggtaattctcatccaagaagtggatgactccaacgtaatattcgaaggtgacaatgtgagctttagggaatgcttcgggagggggaagatcagccgatgaggctttgatggcgcgaagcaagtttttggtaagaccgacggagttgatctaaaggagagagatgaacattttccgagcgacagtgaggttgacatttggtaccttgaaatacgtcttgaataggagattggtcatgttgtagataccccacttacgggactcttcagggggtgctctggatctgatcagcaatggaacaactcaaataatctaaccatatccttacctatcactcaggcacagagtgaacatccggttaatgacccgagcagcctcctccaagttcgcattcttctcaacatcagctgcgatgtcatcctggaacccaaatccagtggagccttgggatgctgcttcaagatcggcattgatcgcgaaagtacgcaagtacttcccgactgtgtacaagcatggcaatgtccaagccggaatgccggcagagcccgagtatccccggatgagggcattggcgacctttttccaggcattgaagactgtaacaacactagcacccggaaggtgatcttcacaccgaagtatttcgcctatagcttcccagtaaacagcaaagatgtcaacccaggcattttgttcggccttcggcaatttcagacttttcccatggaagagagcgtagctgagatccttggatatgtattcggcgttggagaactggtaaaaggagcgcagccgatcgcgatcttcggacggcgcgatcggggtgagcacagcagctaattccgggccggacccgttgaggtatgcgttcttgaatgcggtcgggagagaagtcatggtgaactaccctctggcgaaagagcgcgttgattaaattgattgtcaatttatgagttgaaaagaagcattcgaggtggggaaagggttgagatccgaactgaccaagacaagcaagagtccatacttttggagaaggcatgtggggaaggcgaggcaatgtggctggtgcaatgtggcggaagaggagtggcgcagtcagatggctaaatgggactagcgcagaacggaatgcctccactcgcttagggcaagggcggcaaccctaagcacaattggaacctcacaattctcattttccatcgacggcacactaacgactcatccaccacagcgacaatcacagtgagtacttgccgcttgattttatcggggatttatactaacattgaactcttccagatgggtgagtgatttctattcccttcccgatcccccaggtctttttttcgagacaacggtgtgcgcatattggttggacgaacttcgagacgcaaagaacacccacgatatcgcatgatgcaatcacaaaagaggaggacgcaatggcaaatcgatgtcgcttggaaatgtttatgaaggaacgcacaacgctgtcgatcagggctacgcatggttgaatctcgaagttttcaatatccacatatcacccttgctcttctcgaattttcgccaacctgcatcgcgcaccgtttcatctctcgaactggacatctgggcaattggaatatacactaggaactatggctgacggattcccagggcgtcttactgagtaccaggtcatcgggcgtcacctgcccaacgaggcgaaccccacgcccaagctgtaccgcatgcgcatctttgcgcccaacaccgttgtggccaagtcgcgtttctggtacttcatgtcccagctccgtaagctcaagaaggccaacggcgagatcgtttccctgaacgtggtatgttgggattgaatattcgaggatatggaatggtactcatcgtctcgtgtctagatcgacgagaagcgtcccctcaaggtcaagaacttcggtatctggatccgctacgactcgcgctccggtacccacaacatgtacaaggagttccgtgagatgagccgcaccgacgctgttgaggccctctaccaggacatggctgcccgtcaccgctctcgtttcggttccatccacgtatgttgcgctacccgaaccttccgacaatgaccatattctaatgattatttccctgcagatcctcaaggttgttgagatcgagaacaatgacagcatccgccgcccctacatcaagcagctcctccagaaggacctcaagttccctctgccccaccgcgccggtggcaaggtcggcaagaaggtcttcgcctactctcgcccctctacctttgcttaaatgtgatgtttcgggtgttgggtttggagtgtgtggatgaatgactgtttatggccatagcatgcatgaaagatggtcatgtggaaaccaccgccccgctcacgggcgagatggttggatgtctctagtcccccgtatggtggcatctttaggttattttgaaaaaatcatcgggtttcttgaattattcgagttctagtagcacaatgggcatacatggagagtgcttatttgatagatgccaagacatcatttcggatgtatcaacctgcaatgaaggccttctgattcctgtcaaagtctgtccattcacaaagtggccgtatggttgtactgttacacaaggtactcgttgcaaatcgcttactactggccatatatctcattgtaaactacattcatatagatccatgggggtcaatgctccatataaaatactaatcgatcctatcgccctctttacattgcagtttcggtcttgaagtaagggttgttttagccgcgcctgggaccggcttggatgccttgtatatcaggcacccacgtgctatcttcaactgccattttagttgcaagtctttgattggactggcaataaagactagctacttgaagtatcttatgactatcttcaagtttacttaaacagtctttacagaaccttggaaaacattggtatgtacaggtgtccaggaactattgcgtcattcgaaatcaggtcgggagggagctgtccgctttcgcatatgtaatccaatttcttcggggccttcccaagttcctcgtttccctcttaccccattccccaagtcattgcaatcatgtttgctcgtcaatctttccgttgtgtgcagcccttgaagcaggtaagttgaaaagggttctcaattgaatccccatactaaaaccgttcaatcagggtttccgcaaatactctgcggaggccgctcccaagaagtccaacttggcccccatctacgttggtgtgggcctcgccggtctcggtgctggtttgtaccgctacagcaccggcgcggtcgctgagcccaaggaccgccccaaggtcttcaacggcgaggactgggttgatctcaagttggctaatattgaaatcctgagccccaacgccaagcgtcttcgcttcgagtatgatgataaggaagctgtctctggccttcctgttgcttgtgagtagtctgactccgagcatggttaccaatcaatcactaacaggaatctagctgctctgttgactcgtttcaagcccgagggtgccgagaagaacattctccgtccttatacccccactagtgatgagggtaggaaatcataaaatgcgacttagttttcaaatgctaacacatagcagatatccccggttaccttgaacttgttgtcaagtcctaccccggcggccctatgtctgagcacatccattccatgaacgtcaaccagcgcctgtcgttcaagggtcctcttatcaagtatccctgggaggccaacaagcacgaccacatttgcctgatcgccggtggtactggtatcaccccgatgtaccagctcgctcgtgagatcttcaagaaccccgaggacaagaccaaggtcactttggtcttcggcaatgtcaccgaggaggatatcctcctgaagaaggagctgcatgatttggagaacacttacccccagcgcttccgtgccttctacgtcctggacaagccccctgcggagtggaccggtggcaagggtttcatcaccaaggagctgctgaagaccgttctgccggagcccaaggaggagaacatcaagattttcgtctgcggccctccccccatgtacaaggctatctccggtgctaaggtcagccccaaggaccagggtgagctcactggtatcttgaaggatctgggttacagcaaggaccaggtcttcaagttctagattattgtagagaatttagctagaatatgtcgctagttggctatgcgacaggatagccatgtatattggtgcatcttgttttcggcgtgttgccgtgtctctggctggcttcggacgtcatattatagaagaaatgcattttgcttccaaatagataatcatgtttatctggcgcttgtggttatctctgtcgcattaacaatgataagaactacataggtagatattaagagaggaaaaaagcatgtggaccataatgaagatgaagatgggaagggtggtggatatatatgtgtacaccaactggaaatacttttgcagaatacgatatcaacagaagatggcgccgaagtagtgttaatataggaatacagtaaaacaaaggaatctacacctagaattaattgaataactgcctacatacatatacatgtacacaaagtacctagttattggtagctaagtgacatacattaccaggcactagattatagagtatactgaaataattgcgccggcaagaaaagaattagaaattcagtcaatgcagttttaatgaattgaattaagaagtcagaataggcgttcgtactacaagtttgacaccttgtgttcagttaggtgttcagctgagcccgggcgaccctgaagttgacatagcgggggggagtagaacatagcccacatttgaatatgtccagcccctcaaaaaagggaaaagagcaggaatagtaccaaggactatatctgtgacataacaaaaagatctggagaaatcaatagttaactatatatgaatacaatcaaattccttagcaagtatacaagaataactacatggccccataaaagcctgtcatctgggataggtagttacgtatttattatgaatttagcaatccctaaaatattatggactactatcaaaggacctatgaatgacatagtttaagaactgaaaggtaatactttatgatagccaagtgaatagaataacatatggaaaggactccggaggtgcactgtgttgcctggggttcccgggggtgtgtcgcatgacaaggcccagagcctaagcctaaagcagagcgaaaatgcccggggcacttcgggggtgccttttgctatttagtgggtacccccccccccccccccccccccccccccccccccccnnnnnnnnnnnnnnnnnnnnnnnnnnnnnnnnnnnnnnnnnnnnnnnnnnnnnnnnnnnnnnnnnnnnnnnnnnnnnnnnnnnnnnnnnnnnnnnnnnnnnnnnnnnnnnnnnnnnnnnnnnnnnnnnnnnnnnnnncgatctccggtcctcttccccccttccccccccgaaaaacaggaaaattctcttttcttcaccccaacccattctctcggcttcaaaacaatggcttccaaccaagatgacacgaccgttcaggtcaacaaagaagagctcagacgggccagcgacttggtaattttttccctctctttttttgctctctgacttttgtattttctgcatttcggttcttttcttctgttcttctgttttcttgtgcgcattcccaagtgcgcgcctgctacgcgtcgcgttttaggatctataaagctacccattaagctgttgaagcttagactatatcatctcatacttcagcatcatgttggcaagcttcatgtgcaaaagaaaagaacatcccctgccccttctcctctattcagactcgcagacccatcttgacatcgcgactttcttaccaacttacgcgcttcctgactacccctcttgcttccctaaccatatacccatacatatacacaatgaataagcgtaattgcccttgatataacaccgctaacaatgcctcatagatcgtcatgcgcctcatggaggtgcagtcttacattgctgacctaggcaaggcctacgtccagcatgtaaacaacatcaccgaaggacgcgatgccaacattgagctccccctcggtccctctggattcatgggcccggattttcttttccgtgccggcagccccggtgctaagtctgaggctggtggccccaagaagcgcaagcgcgcgcccgtcgaccccaacgcgcccaagcgtgccttgacaccctacttcttgtatatgcagcacaaccgcagcaagatcgccgccgacttgggcaatgatgcgcgccccaaggatgtcgccgacgagggcacccggcgctggcagagcatggaagatacccagaaggaggtatgtattggcatcaaatcagttccagcttagtattgtactcaagaatacagagctaacacattcgcataggtctggaagaagatgtatgccgccaactacgaccagtacaagcgcgatatggcagcctacaaggccagcaacaaggttgaggaggaccacgatcccgcagccaaccaactgcaacaggactttgccggtgccgagcccgaggctgaggctgaggctggggtcgagggtgaggctgagcacgaggagtctgccgaggagtccaccgaatcatccgacgagtcgcagtccccgtctcccgtgaaggaaaagaccccgccgcgcagcaccaccaagcgccgccgcagtgataccaaggccaaggaagccgagactcctgccaagtcgcctgtcaagcggggtcgcaaggctgcggagccggtgtcaacaccggctgtcaagacaccggctgaaaacaagcgtaggaccaagaagcgcaagagcgaggtgtaaaggagtttgtgatgctttctgctttctgatttgcttgactccggggtcagatgagatgggtatcggtctgttggattggatgtgtaacccctcggtttgcctttttcagcggcgtttggagaaaaactgtacctatttagcctgaacgagtgaaatggactgatcataggacgtggtttctagatatccccatgagttctagtatctatggtaggtcagggctaaatagtaacccgtggacatacaaagccagataaaagaaaaacagactagatctcactaactccaactaagtcccagtgcattaattacatgtaggtagttgattagttaactatcaatttagcaaagccttgactaatgtcgctaacctccgttccccggcccaatcggcctccacggtcacttatcatgggcgatggccttatcagagaagaaagccctggacgccatttgaaatgtaccgcatccccacattcctcgcttttttgcctttcctacttagatctccttgaactgcatcttctacaccttcactaactcttgaggtttcaaacttgctcaaacagcctgaaaattcagttatcctgcacgccaagaactgccaggttcaggttccacatgcactatgcagcttattccgaaggaggcaagtcgcacatacattcccccgagagacaaacaactaacacccctgtagcttgacaagcttaccatcgcccacctaggcttcttggcacagcgtcgtttagcacgtggagtgcggctcaaccatgcagaagctgtggtatgtgtatcttcaagaggtgtaggacacgaccactaatatcccccaacaggccctgatagcctcagtgctacacgaggtacgacaaacgcatccaatcccctacaatgatatcaggacatactatatctccaattgattcaatgcgcaaactaactcaaacccccgcagttaatccgcgatggccagtactccgtcgccgatctgatgtccatcggcaaaacaatgctcggccgccgccacgtcctcccctccgtactggcaaccctcgtcgagctccaagtcgagggaactttcacctccggtacctacctggtaaccgtgcaccacccgatcagtagcgacgagggcgacctcgagcgcgccctgtatggcagtttcttgcccgtccccgcgcccgaggcattccccgacccggacccggaggatttcatgcctgagaagatgcccggcgcggtgattcctgttaagcatgcgcgcgtgcagttgagtgctgggaagaggcgtattaggcttaaggttatgagcaaaggggatcggccgattcaggtgtgtacatttcattcaatttacacggcgcaaaggcaaaaaaagaaaagcggagagaagcaagtgatgctaattacagtgttgattgccaggtcggatcccattaccatttcatcgagacgaacccgcagctgcacttcgaccgcttgcagtcgtacggtttccgactggacatccctgcgggcacatcgatcagattcgagcccggtgatacgaagacggttacgcttgtcgagatcggtgggaatcgcgttatccgcggtggaaattggctggcgaatgggccggtggatatgagtcgtgccgacgagattataaccaagctgcagatagctgggtttgcgcatgtgccagagccgcaggcggatagcgcacttgttgctggattctcgatggagcgcgaggcgtactcgcgcatgtttggtcctacgacgggggatctggtgcggcttgggttgacggatttgtggattaaggttgagaaggacatgacgacttatggggatgagtgttcttttggtgggggcaagacgctgcgcgaggggatgggccaggcatctggtcggtctcataccgagtgtgttgataccgttattacgaatgcgttgattatcgattggactggtatctacaaggctgatatcggtatcaaggatgggcttattgctggtattggtaaggctgggaacccggatgtcatggacggcgtgcatccggatctggtggtgggttcatctacggatgtcattgctggagagaacaagattgttaccgctggtggtatcgacacgcacatccacttgatctgcccgcagcaggtggatgaagccctagcatcgggaatcaccactttcctcggtggcggcactggccctagcactggatcaaacgcgacgacatgtacaccgggaccgaatcacctgcgccagatgatgcaagcatgcgatagcctgccgatcaacatcggcatcaccggaaagggcaacgactgcggaaagaagagcatcgaagagcagatcctagcaggcgcagcaggcctcaagcttcacgaagattggggctccaccccagcagcaatcgacaactgcctcgaagtctgcgacaagtacgatgtgcagtgcatgatacacacggacacactgaacgaatccggcttcgtcgagcagaccatcgaagccttcaaaggccgcacaatccatacctaccacaccgaaggcgcaggcggcggccacgccccagacatcatctctgtcgtcgaacaccctaatgtcctccctagcagcacaaaccctacccgccccttcaccctcaacaccctcgacgaacacctcgacatgttaatggtctgccaccacttatcgaagaacatccccgaggacgtggctttcgccgaaagccgcatccgcgcagagaccatcgccgccgaagacgtcctccaagacctcggcgcgatcagtatgatgtcctctgactcccaagcaatgggccgctgcggcgaagtaatcctccgcacctggcacacagcgcacaagaacaagacacagcgcggcccgctcggaagcgacgccgacagcggcgcggacaatttccgcgtgaagcggtacatcagtaagtacacgatcaaccctgctctcgcgcaggggatgtcgcatctagtcgggtccgtagaggtcggcaaggtagccgatctggtaatgtggaagtcggcgacattcggcacgaagcctacatctgttctgaagagcgggatgattgttactgccgagatgggagatccgaatgcgtcgatcccaactgtcgagccgatgattatacggccgatgtttggtgcgcgcgtcccggctacgtctattatgtttgtttcgcaggcttctatcgatgcggggattgtacagacgtacggattgaagaagcgcattgaggctgtgaggaattgtcgttctgttgggaagaaggatatgaagtttaatgatgctatgccgaagatgaaggttgatccggagagttatactgttgaggcagatgggatgctttgcgatgcagagccggcttcggagttgcccttgacacaggcgtattatatcttctgaggatcttggtggcttctttctgttttgcatgcttttagcttttccctttggtctttacagcttctttatacctcgttactcttctgagttggacattttgcacgatatggatttctatattctaacgaagcgattttcttttacttttacttttctcaaacggcacgtaagtcaataaggaaacaatcatggatcaagcgagctatctttttctccttttctctcctcaaaaccctaaagaagccaaggtcccctcaatagaatcaacaacaatcctatccgtcctgcgcccatcagtattaacaagaatatccgcccagtgcaacaaactagcaataagatcattgcacatgaacggcacattatggctatagaacccgtacggtttcgccaggacataagcgttgccacgagcatcaacagccatagccatagaggtatccttgatccgatgaacactagtaacaagctcacgtagactctcagaaacatcctcataagcctgggggtccgctctcagcaccctcgcctgcatccctaaaccggagacaaacgtcgcgcgctcacgtttaaaagccgacacagggccaggtcggggaggcataatagccatagcgtcgtaggagagacggtaggtcgaatatacgagaaacaaaccagtagtaagtgataatccaattccagaacctatctaaaagcacaagttagccacaatctgatcaatcagtctcgccacagcaataggaacgtcagtgcaaaggttatcgcgcagccgatccgcaagataggcacactggcccttgatcgcggcgcagtgcataggaacgaccgtctcgtagaagccactctgttgtactaggacgtagggatggtgacggctctcgacggccatcttcctcgaaagagaggcgacgatgtcgatatgctggatgagctggaggcggaggttggggatcacatacgcacggctgtcgatgtcgtggcgtaggaaggtcgattgctgctctaggagggtcacgaggttgtcgcgcgccttgcggaaggcggagacgcgggcttggtttatatgcgccatggtgatgcgaatgaggggattgtgggggctatagatctagatggaaatggaaatgttaatgtgaatgaatgtattggaacgtacctgggtctggagctgagatacagctacagctatagctacgccgatgttgatactaatgctgatactggcgtgagtccgcaactcgacggggtggaaatgaggatctagatgtagcccaggttagccactgcatgttccagatggagtgcgatctcgtgctcggtgttgataatgggacggtggatgtggtcatggaggatcttggccatctggagggtatcacggccgaccatgtcacagatctggggaatggtgcaggtgaagtgggcgattccctgggaggtgacatatttcatgtccgcggcatcaacagcgagggcttgggaagcccacttcaccttgtcagcctgaaccttcagggactggatgttgagggcgacctcaatgaggtagttgccctcgggcatctggcgtaaagtggcgatataggaacggatgttgtttactagaataccgcgctccttccggtacttgaaaatagcccgagtaccacggaaaagtctagtaccgatagactcaggcattgtggatgaacggggaggggctgatgtcctctggtgatatagaaagggagagatgaatagatgaatgggatgtatcacttacctgcttagggctagtggattaagtgtaaagctgagagtagagtagactgaactggttgtactgatggagaaagaactgtgaggcggatgattcctcgaaatgtcaaggaataagggcctatttatgcatttgcatctcactggcttgaatagcctgtagacaaggccttcatcaagaagaaaggaatgaaaggcatatgacttgttgttgaggaactttgttctctttgtcctcagatatgtaagtagtcatgatgttgaaagaaattagtatacaagggaaggggaaggtagttgcagggtagaccaaggctttgttataatattagattcgtatggccattgttcagttctttgttctctatagtggaatcatcaagaaaattatgatattgatgctttactcgcgccaggtttttagggtttgtctcgacaatgtagggtcttttattggtggaccaaccttgctgtttataggcccacaaagctgatgtttaagggtaacagtgcagagtaagtgatgtattaatctggagcacgaaaatacttttgcaagtcagtgatccatctaggcaattctatgaaaggaacagaaacccacgatggcatagttcctgccattggcgaaatgctagatggcaagatcgagaaaaaaactcagaggggtatcatatatagtaaattgaagaagatagaaaaaacaaaaggacacagatccatccgcctaccaatatgaataaattatcaagcctatagctcaatctcctcctcaccatgatgatcacccgccgaaagaattgatatattcgtccaagctgagaaagtaccttcgcgcgcagctagataagcagcaacacgcgcatggcgtgatcgattcagattttcttctcctcgcgctgggtcccgtagcctatttccaacggaattttggtccggagagtcaaacgctgactcggagatggagagagcaagtatgtctgtgtgttgactgtctgttttttggttgattggatgaggagatgaagtaccgtcgccagttaggtcaatgatccctgtagatgtgcttggttcggacctgtgtcggagccctctagccgaaggttctaaatatggctggtcaggtatgagcgtatcctcttcttcacttccctcatcactggccggatcaaacctgtcttcctttcctgtcggccatgtagacgggagaggattgacttgaaacagtctaggctctgcatgctcttggagatatcggtgtgcttgacggatttcgttgcgtttaactctggccgcctcttcgaattgactcaaacgatgtagagagtcctgcttctgatcaggatgacggcttgcatcggcgataccaaggctcaaatcttcaattccactactggattcttgtgtggactgtgtagagaggtccatgtcgtaccgggccctttttcttgcgcgcaaatctccctcgccatcaacatgattagctacaatttgctgcatgtaattgtcgtgtgaaaaatcggttcctgagcagaggtggccaaacaggcgtctgatggagatgtcttcgttccaggtcgttggatccacggtgcatggatgaatgtccttgggccggaaggcagctacgagctcacacagttcggagtaggaagagtgtcgtgaatatgggaaccgctataatggcattagaggattatcgaagaaaacagtagtgccacttactatcgtgttgggcaggtctgtctgggacgaccggctagatgtatcagatggaccatggcttagagcggtcaccagattcttcaatgagatttcaccttcctccttcacgccatatgtatcaagcgagagcgccttctttctcgactggaaagcatccataagggcacctcggatctgagaaagggcttttttgtcctggacgtgtttgagacacagcttctctaactcgaccaatgtagattcatctggcagctcgagttcatgagtttgatacaaatccccaataccaccgcccgcaccgacctcagggatttccgcaccgccggttgtgcgattcacaatgggcacaatgtagaccgtgttagtgccgcgagctgccaaacatgagaccccaggctcgcaactgtggattcgactcgattcgtcgttgcttaggcagcctgttacagctctgtttcctagctcgaagccacagagagcagggacttcaccaacccccctattgcctggagtctggactagagaccgataaagtcccatctggtaacgatccacatggatctacgctaattagcgaatgctatgtttgagcggcgtggtatcaatcaccttcgtgttcagcgcagctgagagcgccatccaaacatcctcgtaaccgaatgtccacgcacggaagtagaagactgtatcatcaggataagcctggactttttgcagcagctcagacagtccctcggccttggaagggaactccaggaatgggtttgtcttgcttgcaaatgtagagtccagatacaggttatccagccgtttctggcccagagtatacggtatcaagaccgggtggcggactaggctgctcacccaccatgtctcggctgagaataatcagctagtagttcaaccaagatgagacatcattgactcacctcggatgtcacctgtgtaaatgattgccttctcgtccccttgaattagaaacatcacagccccagtgcaatggttggcatcaaacaacgtcactctgatatgacgtcgaggagtgagttcaatttctgttggggtattcagtggaattgggcgctgtgtgggatgagcacctggtcaactctagtcaaagtgtagaactatactaaccagaagctttgcgagatgcttatagtgcagtcggcgtgactccaagatgcctttattaaagttcatccgatggggatacttttcaattcggaggagtagctgcgcatggtcagtttaaagaatttaataggatacacaggagcgtgcctctcgcgtggctggcgagcagtagataaacggtgcccgaaaggactcgaggccctgtaaatgatcgctatgcacatggctgaggaagcaagctagtggtgccggccgctctgggcatttccgaaaatagtcaactgcttttcttagccgtaagtttggctgatttcataggtgaagctcactgcgaatatccggaaactctgtcggatgattagcgtgggcagtgacgtggaagtgccggtctcaccttctacgatgccattgaaggtcgacatggcaacacattcagaagctgaggtcagattgcatgtccaaggttgcccaggtgaagatgtgctagactgctagaatgctaaacctgttgcttgcacgtgatgtgaacatagaaccgaaagggtcataaaacaaatccaaatatgtccaatctttgtataataaaactaattcagagcattatggttcgatggattatattgcatagttaaatatgcgaagttcaagtccaagtccagaaggaatgtgttctacgccttaacagctggccgtgcatcgtggccatgccatgccaacgcacacttgggaatcttagttataaagcccaagacctgttgtctcttcccaaactattctattttctttctgtttctttccagtttctattttccaccttcttctgcaattgactatcaatggtacgcctgtgagaccttcaattcccccaagggtcaaagagccgaaacgtcagctggggcacctgatcgagatttctcttctcttcttaattattatatccagtgacttgcattacgggaaatccaggttgaagaagcatttctgttgtattctcaagaatttactatccgcgccgtctctagcgttgttaccccccactgccaactgaagctctcctcacccccaaaacatccacgtccaaacgtccgggaatttgacaaagggcaaggggggacccttcagggctggatatcccgaatcatcacattccagggtgcctaggacgacctcgcctcttttaatttgctcctttacctcttaactccctccacatccgaccttcaccatgcgtaaaccgtccgtgggtcaaatcgtgtataacgccacgtttccacgacctcgtccaaacgacccagggtcgtttggtgctcacattacccgaaacctcgtcccagaagtacgtgtcgaaacatccctcttctacggctcgctagactgcatcgaagcacaatacccggggctggactactcgtatggaccgcatcgcatgcgactgggtcgtttcccttggcaccgaaagctatttcaaacttttgaccaacttggtctgacagaggaggagatctccaatctgtgtcgatgggaagggaccaagtccgcgcgtcagcggtacgaggcagaagaaggcatcactgtacaggacactacagcccactcggtccgaccggcatctcctcaacccgccccgtcaatcgagatccacttcattgactgcgacttctgcgggacagaagaggaagatgaccagatcatcgagactcaaagcaatgacacggtccgtgcgatcgattcccgagcctccagttaccggtccgccgaggagcacgaaatcgaagaggaactaagcgacgaggaaatggaaagttgtggcgtagccctcaacaaccgaatccttgctgcgatggccgctcgcgaccaaggcactgatgtgccgctggatgaagactgggaacaatggctgaaggaggctggagaacgtggcagtttcggtgagatggtgcatgctattcgcgcgaaccagcccttgactcttgtcgccgacaatgtccgaatcccacgcggtcgcggtgcggctcgtgtggtgacaagggcggccttgttcacagtgccagacagcattatcgcaacaaacactgcacttccatctacatccaaccatgcctccggcacggctcaatgactgcataatatttactcgaccatcagaccctttggatagagccctgttctgattcgtgttttgcatttttacggcgcatcttacctctctcgcattgtctgaagtggactggctccttcttctcggggttccctttgcttttctttatctatatccttacgacacccccagaagattcttttgcatacgcatacgcatagatttcattgtctcctgtctcattttcattaataccctcatgttcctactcctcatcatgctttgttgtttgactcgttaactttttcattatttgctgcgccggggatattcatattcaacgtgttaatcgggggattttcagcaaacagcaaaaattattctaacttactcagaaatatatttacgaatatcattcccatgcttgtccaatatatgagtagcgtacagctcgatctgcagactgaatctgccttggtattgaacattattcaaaaaagctagtttttggggataaaaagagtggaatcaaatatcatggtcctgtccgacacgagaaaaatcccatgctatgccctcatctttgttagtgccgaccacgagctttacgccgtctctccgcatcggcaagaatccactgccccgatttacgaggaggacatagccgccattcggatgttgtcgcacacaaaacgattcgtagtcccggtgcaacttagcctccgcgataaattcacccttgttgttacgcccgagaaaggtgccggaaaccacgttttgaaaccccaacaatctctcgtcggattcgacgcatgaccagtggataccacccacgtactcactgtcttcagggacaaggcgtaaaatgcctctctgaagcccaatagcaaggcctgtcaaagggcagcggatgatgaatgatctgcctttccaaggacaatgcctagagcgggcttcgatatactccataagggagcctatggattcatcgtcaagaccaccagatgtgggtgtatcgcatttccgatcttctgtggtagtggaagacatcgtttcttcgattcagagctagaagggaaggatgttgatttcctttcttgttggcttgcggctaagttggtcaaccttattttgtagccattgtttgagggaagactagggatgtttacagattaggagcccctgtgagatgtgtgtagaaaagaatatctttgaataaggaaaagcaagacgtacaacatggagtgagttggtagacaaagtgcggggatagctagaaactatgtatcacatgatctgagctttaaccgtacacagtctagcctaatttggaatagtctgagagacattgacttcgataagctctccgctccgaggtccgctccgcaactgatctccatgccatgaacatgaacatgaatctcatttcagctttgtgtttgattgaatttggccaatagcctgcgctgattcacaccctgcttagctttacacattcatatcaaccctacaacacagccacgatgatcaaggcaatcttctatagtaaatttgacacgatagagggtaaggaccttcaataccatgatgaaccttgaattcgttacatactgactgatgttatgcagggcccaaagtcgtccatcaagtccccgacggagctatcgtgccctccccaaccgcgccctcacaaccacccttcctcactttctccgatgtctccttcttcgtgatcccccgccaggagctctgtgggaaccttttgcaagtctgcacaaacggatatcgtatcctgggatacccaatatgcatgaagtctgtgcggtatgaccggaatgagttcatcttcaacttctgcatagtcctcgcagaggaggacgactttagcacgtataagagcgtggtgcagaaactagcagatctaatgcatggcctagaagagcagaatggtttcttgtcccgtgatttctcgaagagtggtgaagggaaggtgtatagtctctgtgagatgttgatggaggacttgaacaactattgcgagtgcatgattcccattggtatgcccatgaacctgtttagcgtgattccgctgctaattattctacccagacgatttaaacactctgaatatcaagcttttcccgatatacccttctcccccagccgtcaaggcctggcaagtgccgctcttcacgttgcgataccaggctttcatggatgagaactgggatttgaccatgcaaagggtatgtgaaagatgacaatgagacccccccccacccccatatggctaggaagacagcagctgaaccccggcagattgtaccacatatcaacggcgtcaacagcgtccgcatcatctccgtactagcagacacagacttctccctcacctgccgcgccctccgacatctcctctactatggctgtctattcatcctcgacatcttctccttctccgccatctacgccccaaccgcccagtttaccgcaacaataggctccgacgaagcaatgcaactagaatgtgcccgctacgtaaacctccgcttcgcaccacacccagcaaccggaccctcctcccctccaccccccagccttatccccagcccaagcgccaacggcagcacaaatggcagcttaaacgacagctccgaaacagctcagctctccagctcccttaccgacccaacacctagcctcacacgggaagaatcccgcttcgacgccgaagaaatctggcccctcctaggcgccgaagaaaactcttccacctccacctccccaaaaacacccccaaacacgctccacaaaccagcgatcgttgacggcgccgcgctggtcgagctatacgcaagcctaaaacaaggccagagcgtcaagcaatggtacgcaacgcacagtcgctcgctagccaacattgacatccgtcgcttcatcactttcggcgtgataaagggcttcctgtaccgcgtgcacaaatatgcctgtgcaacgagtcagcctgcccccccgccgcgtgcgtcctcgttcacgccaacggctctgtcgtcgcgcgtcaataccggcaccaatacaccctatgcgatctctagtgtgtcggaggacgcgtctatctcgacggctgcgaggagggagtctagtcgtgagcgggctgggtcggtggtgagtgggggtcggaatgcgaatgggagtgcgggggcgccgtcggcgttttgggacgaggaggatgaggttgtcggggatgaggctcttgggaagtatcttgatggtacgcattgctttgatcagatttgtacggagttggagatgagtgagagggagctgacggctagattgaagaggtatccctgggaggtattgattcttcatagatgagttgggggagtttttttttggcaggtttttttatattgtcggaattgattgataccctacttttgcgtttatatggttcccaaggtaccgctggagacttgaagattgggaacctttgtctcattgtaagctcacagcttgggacttaaggataagaatatatgaacataatcacatataactaggtagttagttatagtatgttgtggaaaagacccagtgtaatttcaggcggactacaaaatagccagcagttcaacatttgatgttgtggaacagaaaaaaaagaggtatccgctaacgccacgctagtccatcatgcatttgtatcgtatcgtgcaaaaaataagtcaaagttgaggtggctaagaggcagccaaatgatagaagacgggttatcttcgagtgatgaagatccggcagagaacggagagggaggaatcattcctcgtcccagttctcaagctcggctttctcgtattcagccatgacttctgggtcgaagatcgactctccctcagagggaatggtagtcttgatgtcgtcaaagataggcaggaatgcctcgttccagcgacgacgacggtccataacaatctttgcagcgtctccgacagcaggacgggatactcccgcagaaccagcgacgtggctgccgccgcctgcgccgcctggccgatgcttgggctgagcacccttcttgcttttgcccatagtgcgggtgcgtttgagataggcctgttggacctgagagtcgaggtcgtcttggatggtagtaaactcaagcatggccatgtgctcctgggcaatctttagaatgcgagctttgcgagcattgttggtgacgatttgcctcttgagctcgttttggagtaagcggagtcgctcagcaacttcatcatcgtagtgagcgtcgtagtctggattatcatctgcaccgaggaaaccaatgaatcgcaattcggctttggcgcgttcgtccaattgggcatgatccagctttgcgaccgaggttttgaagtcgtttggatctgcgtcgcggaaggtggttgcagcagggagaggcttgacttcgcttttgttctccttctcaacggtgggttgatcaatgtccattgcgtccttatccagcccacttacactcgcagtatccccatttgcggttggattggaatcctcgggaaaggtacggtgctcgtaacggaggagagagcagaggcggctgaggagaggtccaaccgagacttcgttggtttcggctttatcgtcagtcagctgttcaatgctgccacggccttgattcaaaggcagctggtccttgtcatcttgactcgagtcgtatgacactccatcctcctccgcccaaatttgacggtagtttttctttgcgcggcggggcatgatgaacggggtagtgcgatcaccctgtgacaggtcagcttgtgctgactgaaagtagctacaattgacttaccctttcttttaaccaggcaatgtcctcctcggtaagaggccggacgtaaggttcaatgtaagtctggaaagtattcgcgctgacttggttggaaggtttggcattgctgaagtccttatcaggagccacacccgctgccatatgagcaagatcggtcttagggaagtgagaaacgctgtaaatctctttcttatcatcgtccgtcatgcctgggagaacatctcgaatgttgtagatggtggggtcgtcaaacttcagcgggttatcgccaaagacttgcacctgaggaatcgcaggttgaggttcaggttggtgggaatcggcactggtttcagacccgggggtcccggggggagggccgtcaacagcagtggttgtgccattgggggacatcatcgatggaggtgaaagcgaggaactttcatcagatatcgcatttttggagtttttcgatgctggagaagccgctgttggtagttagcgaaggctgaacggtggggaaagtgaaagaagatcaagttgtggagatgggtcggtaaaaacaaagagttggaagaaagcgccgagttggatcttttcttacctccctcaaccttagtctcagctccatcctggcgtgctacctcatgtgcgccatgatttaacggccgctcctcttttccacttgggcgctctttccgcttcttcagcttcccgcccttatgaatatcgtcgtcctcttcggtttcacgtttcaacttcgagcgatctcgaacttcacgatcaagctcctgatcgtccacttccttgcgcttttgagacatctcgcgcattccggcattgcaaacctcgcctcgaagatcggccatgtcactaagacccttcaggtgctccaccaatgcctccagtgtttttgaatctggaatgttctgcgcggagaccaggtccaacacatcggagtactgcacgctagccaagtcaatgtgcttggtgacatcgttctctaagtagctttggataggtagtgatgggatagcgggagcactagcgctggacggggtggtattgcggctacgcgactggcgcgcatcgcggcctttgcctttgcctttgtatgcggatggcatggtatttctgcagaccgattattggacgaagcgaaaagaagagatgaattgattaagataccaaagacagcagtatcaacgaagagagagattgattgacagaaaggttcctaggaggtgtggatgggactagacagacacatgctgtcgtcggtcactgtgagcgaataataatgaaaggagattgaatgtcccctaaagttgcctgatcataagctaaagcagacacaatctctcgatcatggatgaattagactttctagaggtgatgatggttggcggtcgctggcggtcggccagaatatgcacgtgatggcgatccgacatgtatcatcacgtgctccatcttcaattcattggttcctgagcacttggctatggaactttgcctttgagcttattcaatttttttgcactgtatatacagcttgcacctcaccacttgttggctcacacatggtctagccgcccaagaatgtggttgaggttgaaatctgatacacattcctacagttctgcggagggagccccgatatcggctactccgacattctgagggatgaggcagagcaaatcatgtgttttttgtgaattgttgcaagcgttgaataattactatttataacacagtctcgctagttaaatcccaatgtcaagtgtaaaaggttggaaagttgcctgttgatgatcatctcctcaaacggtctaccgtgaacggccatgtttagcgaagtacacgatatagaccacgcgctcggccatttccatttgttgactcgttcccggagatatcttcgaaatgtgaaactcagtgtatcttagccaagccgttttgcctcttgcctcgtggttggaaccagtattgttctacattcttgtgacggtcccgattgactctcgcattcttccgctgtagagctctaaacagcaatggggatgtatgggatgcttcagggctcagcgtcgtcttaaatgactttgcatagaaccatagtggttgccattttcaaactctttcatattcaacttgtttcccctacgccttccccgcgggtctgaagcatttagactcatagtatatactttacttgacagtcaccttcattattcacttgacccaagatcagatatattatgtcagctgctaccatgtcaacgcgaaatgactcggtgggtaaagtggctacactttgggcaggttcagggcaagcttcgaattccacctcgtcagtcgaagtaagtctgccttcttcattaaaagccgacaacagcatttggaactgattctaactcacataattacataggagaatgtcgcctatcggtttgttctcgaccataaggttcaaacaatatcgagcaatggcatccccgaggatggattggtatcaggcctcttgtttgtacccagtctagagccgcatgatccgtgctatgacattactgcttcgtccgtgccgtcaaatgtgacccgatatgaagatgtgtctgacttcggatactccctcgttggccttgctccatgggtaactgccgaatgttcgctatcgttcctctcagccgcccaaaaggttggcacgcacgctatgatctttttccagccgtcagataacgagaccggcataccacctgactcgaacgactctcgctgggcaaccagtgacggagataaatggcgaatggacaacgattacccagtgtacgccattcctggcccagctggaactacattgatcaatgatctctcgtggtattcaaataagacacccgaagacaagagagacaactctaccgaaaattttgcgctacagacgaagacaaaccgattgtttgctaggattgagactggtaggtcacaaaaatgcgttactttcgaatctatactcacatatcgcaggcgaagaaacacaaggggcgtcgacgagcgtttggagtttcgtacttgcaattgcaggaacagttcttatactcagtatcctcctgatcattatctatcgatttgtcctgcgtaagagacgcgctcagctgcagagacgtgttaatgcaggtcaagtcgacatcgaggccttggcattgaaccaaatgacggctcctcaagaggtggttaacaaaatgccacgttatacatacttggagatcatccctccaacagaagcaacgctgccacaagataatacatcggccaatccaatcgagcatggctctggagacaagatcaactcgctatggctcaaggaaaacaaccatgcccaggacgatgctggcctccagaaacccgaagcagcgatgataaagcctaaacagaacgatacttgcagaagcaagtaccgtctgagccatactcaaacgacttgtgctatttgtctcgacgattttgttgttgggtcatctacggtccgcgaactgccttgcggacacatattcgactcagcgtgtatcgatccattcctgacccagaactgctgcctttgtcccttatgcaagaagagcgttttgccagcaggatcatactatatctctgtgacgaatgaaatggtcgaacgagagcatctttcgagacgcccttgaatgcagcacgggagactgcttttgcgtgcttttagattatgccagcatggagagagcgaggattactagttgcatttactaagcgaggcgatttgacgatcttgatgtttttgtatgatgttttgatagtgattgtatcaaatcaaacaatttaaacaaaattatccaattatggaattacaagatcagtcgccacttacccggtctctgtccttgaagatggtgcttctagtatgcctgttttaatcctggtcataagaaggcctcttcctattttatccttttactttcattcaatattgctcagaccattcatcactaggacatgtaattaccaaattagaataattttcagcctgaggcaggcagatgatgctgacacctgattttcaaggcaaagaggaagctcacactgtgattggccctggtgggtcaactcgctaatcgctagcgtcccacacacaacctctgcctccagaccttttcttcctcgaacttttgcgacaacgacaaccgacgacatcgtacagccgacaaggtacgttagcatttttttttcaatacaatctccgccgcaagtgcacttctctgacttataaccgtccagatgggtgccctcaagtacgtggaagaaatccagaagaagaagcagtccgatgtgattcgcttcctgctgcgcgtccgatgctgggaggtgagataaatcccttcgcccccgattgcctaacatctccgccgagcactggtgtgcgttgccttaggatatgccgtttttatgtggtattgctaggcggctcgaacaaagtcattcggcggaaatgattgtggcacgcaagaaaaccctttcgggcttcatgtgtcttgctatacactcgttgaacattgctgagagtgcataatatagctccgccagctgaacgccatccaccgtgcctcgcgcccttcgcgccccgacaaggcccgtcgtctcggttacaaggccaagcagggttacgttatctaccgtgcccgtgtccgccgcggtggccgcaaacgccctgtctccaagggtgccacttacggtacgaatttttcctgtcgagagcagatttcctagagatctgagggaattgaaggaatttttttagctaatgtgcgattatgtgaacaggcaagcccaccaaccacggtgtcaaccagctcaagtaccagcgtgctctcaagtccaccgctgaggagcgtgttggccgccgcgctgctaacttgcgcgtcctgaactcctactggatcaaccaggactccacctacaagtactacgaggttatccttgtcgatccccagcacaaggccatccgccgtgatgcccgcatcaactggatctgtaaccccgttcacaaggtaagtttggctcgaaatttgactgtgttgcccgcgagctttgctgatctggtccccctttctagcaccgtgagtcccgtggccttaccgccaccggcaagaagtcccgtggtatcaacaagggtcaccgctacaacaacaccaaggctggtcgccgccacacctggaagcgccagaacacccagagctactggcgttaccgttaagtgcggtagtgcactttcccagtggtttcggttggaaaatattggttacggcatgtggtcatttattcaaacacttctttcccagacagtgttttccacgctgggctcaactttaatgcagaccagtcggttctgttgttagccaaaaagccatcttgttctatgtttcaattcccttattaacgaagtatgactggttcagctcaatggtactggcattgtagaaagtgtagtcttgaattagtgctactttttactagttctatgtatgcatgtatgcatatcactgattttcaactcccagtgtcacatttgcgggtggtgtactccgctggacttgcggtggccagtcgccgttagatcgaacctcagtggatcgctagaaagtagtctagtgcacataatacatattcagactttatacgctaaggctgtctttgattgttattgtgtaacgatcatcgatgtgcgttctaactagttaacgtaatccactaccgagctggccacaccaccgagctggccaccccacccaaaacgcgtccatgaattagcacttaatgaattcaaccacccaccatgccactaattcgctctcaaagctctcgaaattcaatagagcaagaaggcaggatcttattagctatccaggctattaagaaccgagaaattagttctattcgggaagcagcacgcatcttcgcagtactgagatcgacccttaccacgcgcctccggggcgtacaaaaccgcgcgatttctcggcctaactcacataaattgacagaaatcgaagaggaatcgcttacaaaatggataatatctatagattctcgcggatcagcccctcggccctctactgttcgagaaatggcgaatcttttactcgaattgcgcggaataaccccggttcttttagtcggcgagaattaggttacaaagtttgtaaaaaggtatcccgaactctcaagccgattctcaagacgctataactacgaatgtgtaaagtgcgaagacccgaaaactattggggagtggttttatctcgttcaaaaaactatcctttaatatggtatcgatcccgacgatatttataactttaataagactggttttgcaataggattaactgtaaccgcgagggttattacgagggctgaatattacggttgccgatcgcttttacaacctagaaatcgcgagtgggtgactgtaattgagtatataaatactttgggatagacgctccctctgtatatgatttttaaaggcaaagtctttattaaatcttggtttaacggcctccctgatgattggcgatttgaagttagtctaaacggatagacctctgatgaaattggacttcgatagcttgaaaagctctttattccgtcgacttctttatagacgaaggggaggtattaacttctaatacttaacggccatggaagtcatttaaccccgaagttcgacgaaatttgtgaaaaaaataacattattccaatctgtatacctccgcacttatcttaccttttacagccacttgatatcggttattttgcggtattaaaacgcttgtacagttggatggttgaaacgaaaatacggagtgggataaattatatcgataaacttgatttcctcgaagcttacccgtccgcccgaatcgaggccttcaaagaagatactattaaaaatagcttcggagcagctggtttagtgccttttgaacctgatcgagtgattttaaagcttaatattcgccttcgaactccgacccccctttcgagctaagagagcgagtgggagccaaaaacgccttcgaactataaacaattgctaaagcaagcttcctcaattaaagcattgcttcgtacgaggtctcgaagccctccgagcccgcttaattctgcgataaaccaggttttaaaagcctgtcaagttacaatgcaatcggctgcttttctcgagaaagaagtaagcgatttacgggctgcaaacgagaagcagaagcaaaagcgcactcgatctagaaagcagataccttctaccgagggcctctcggttttagaagcatcgatattaattgtgcagccagaggaagcaattgaaccacctccccctcctcagctaagaaggccttcgccacctttattaccccgaacgagagtgttaaataggtgcggagcatgtggaaatctcgggcataaaagaaatgcatgtccagatagacctagatagatagttttattaatttatggcgttttggttgagatatattgatttaaaattcagaggttggttttggtggccagctcggtggtgtggccagctcggtagtggattacgttatttagactttcccatcaccatttccccatctgatacatcccaacgaggccaatttcatcgtgagttttatttctatctttacacgcttctaatagctaacatctacacttggactaggcactctctgcgtggaccctacaagcaaagtcaagactctcatctatttaccctcatctaccaccaagatgccatccagtgacgcacttcgtatatacccccccttctgcattccaacacaaattgttatctatggctgactttaactggaacagaaccgcctcttacgcccgctgagcgggcaattgtcaaatcctacggcggtagtggattacgttagttacgaaattagacccgtagcccgaactttcaggtctctaatctaaaaataggcctttaatgccttaggcatggaccacttccccccccggcctctttcccaatccgtctacagactatgaactgctgtaacgatccatcactctataatagagtccgaggtaagatagtcatttgctcggtgagacttgattagattactgaaggtccatttctgcaatagaccaacctgtcatttatcaaacaaagaagcaaagctcgctttactcgactgccttacccccactccgtcctcccgtcctccacgtatgtgtttggtacgaaggacaagctccacgagctggattacatactggagaggtcgaatttgatcaaatcaaatcacatcaaattgatgcgcctctatgccgtcccggcctgaacgtcatctgcctatccctccgatctcaagtgctggcaacgccgccatccctggaatacacccttcccaattttctggactggaaatcaatccacgccgtatggctcgacctcgcgatgcttcgatcatgcccccattaaacggcggtacccccaagagttcgtaccaccgaggacattcacgctcgatcagcaatccgttcgctgggtttgggcgaaaacgggacaagacagtcgccaagtatgcgacttgggactctgacgatgatgacgacgatgaggtaacatatcccttggagccagagtcgtcaagtccccggaaaggtgcagcacctggaaatgatctcgccgagggcaagtgtcagacttgtgatgctaccgtccggtggccacggcacttgaaggtgtttagatgtaccgactgcttgatgatcacagacctcgagccgatttctcatgattcaaaagacaaacccccacaagggtctcagggtggagcgtccaatttggcaagcaaaggtaacacctccagatgctagttttgcgtcatatatttgtaaaagatactgatttgctacctagtgtttcctttgacggccaatcaaattcgtggtatggtcggggggtgtctcaacatgtatttcgatagccttttggacaatagccctcggtcatggttgtcgccggacgacgacagaaagaacaaaccgctacctaatcttccgccaatgcaggatcatgcctctggtccaaaaaatctctcgcccccacgcactggcgattctcggagtcgtagtgcttcccattctagtgaacgggaaaggttggcggcgtcaaaagaaaactcaggttacttgacaccaccatctgttcgctgggagggcaatgacacgcctgtcagagtccgagcaaattcagatctccgatcaactccaaagctagacagccgcacgcaagacgtttcgcaagccgggaacccggagtttcaaagctgcgacaatcggacacacattttcaaacggctggaaaataccatcgccactgccttcaaaggctgtgactgcctcaacgaatctttcactacatatccaccacctcggtcagcccgagcagctagtaatggtaatccaccgaaaacgaagatggaaccgaccacaatgccccaaccagcgcaagacgctccagtttttgaaccagatgccaaaactcttcttttaggagatttgactgagaactcctcttggtggatgaatgaatgggctgagaccgaaggccaaaatcccgcatattccaaagagaagaacaccccaaagtctcggatgatatcatcgcgaagtcctcggatcaactggtccgagttagcccagtggtaccattcgatcctgtccgcgggaaattcttggaatgagctctgggccgccaaaaagcctgaccccacaagatcagaagcggatctgatccgagccaagagatgggcgtctattgatccgtccttgatcggaagacaagtcagcgagtctcgtttgcacttacaacgggcactcttgaaagctaccgagggcctcctcaaacgcccgcgccgtgttctgaagaaaccagaagataccaggttcttgttcatattgttagcgaatcctatgttgtcttcacctgcgtcttattatcagaatacatccatctcgccgtctcatcgagatgagaggcgcccatcgcatccaaaagactacctgaaatcggcaacccgagacggaaaacccttgcagaaagagccgcacaaagcccctgctcgtctagatggctccagtcaccattatggaattatcaaacgaatcctgggactcgcgtctaatttgcccaatgactgccatcactacatcgtgtcttgggcttcccgtttctctgttagacatttcgagcgactggtagaacttatcggtggatttctcacttaccgtttgagtcgccagcatgggcgaaaacgccctcaaaatcctcaaaacggagatgatctaataccgagctttgccagtgcttcgggaaatactgctgcggaactccacgctgcgattaatcgaagtagcccgaacaagaagcctggcaaaaagaccgaagaccccataatatacgccgaggactggcagatcagagcagcagcaagagtaatgtcgctgttcttcacggctaacatctcctctgcaacgaggaagtctgatggaactccgcgcagtcttgaagttcccaagaacccaggccctcgtcaaggacatatgattccaatcagtgcattctacaatacactgctggactattcggatttagtggcggacttcgagacttgggaggctaaagtctcgaagttttcgttctgtcagtatccgttcctccttagcatctgggccaaaattcatatcatggagcatgatgcgcgtcgtcaaatggaagtgaaagcacgcgatgcatttttcgacagcgtcctcaaccacacggcggttagtcagtacctggtgttgaaggtacggcgtgagtgtttgattgaagacagcctgaagggagtgagtgaaattgttggtactggccaagaagaaatcaaaaagggtctccggatcgaattttcgggcgaagaaggcattgatgctggcggcctgcggaaggaatggtttctgctgcttgttcgagaggtctttgacccgcttcatggtcagcgttttccgatcttagagtgaaatgactcgctaattcaaaataggcctcttcatctacgatgacgattcgcagtattgctacttcaatccttattgctttgagtcatccgaacaattcttcttggttggggttcttctaggtctcgccatctacaactccaccatccttgatgttagtctcccgccgtttgcgtttaagaaattgctgtcgtcagcggggcatgccaacgggccacaactggctacttccttgcgttcgaccttcaaatgcaccctagaagatcttgccgagtaccggccagctctcgccaaaggactccggggtctgctagaattcgaaggcaatgtcgcggagacattctgctacgatttcgttgcccaggtcgatcgctacggcgagattatcagtgtgccactctgtgcaaatggcgagaaccgaccggtgaccaactccaacaagcgtgagtttgtggatttgtatgtccaatatctgctagacacagccgtggctcgacagttcgaacctttcaaacgcggtttcttcacggtctgcggcggcaatgcactatcactattccgaccagaagagatcgaaatgctagtccgcggctcagatgaaccactcgatgtcaattctctccgggcggtggccacctacgacaactggtcacacccacgaccagaatcagtccctgtagtgcgctggttctgggacttcttggagaaatcagaccctcaagcacagcgcaagatcttgtcattcattactggtagcgatcggatccctgccatgggggctacaagccttattatccggcttgcttgtcttggggatgactgtcctcgttacccgattgcgcgtacatgtttcaacacgctgggcctttaccgctaccccacacgggggaagttccagcggctgctctgggatgcagttgtaaatagcgaaggatttggcttgaaatgatttgtttattcctgctcgggacttgtgttactattggtgtttgagaatttgtatagacgctggacgttgatttcgaagtgagctttgcatgttcatactttgcgtcgtgtttgctttctttcttttgctcttcattccgccatggagtaccggtgctgttatttcttgccttgcaaactgcacatgaggttttgtgtcttgtttttattgattcagtcttggtgactgagagagtctcgttctaatttgcattcctggacgttgttttcattctagcacacttgacatagattgatagatccctcacctcaccttcaagcgaactcccgagccttccatgtcaggaaagaacaactcaaatttccccatcaccacaccaacctcatacctttgatttaagtgatccgtaagcatcgatgatcacttcttgtatctaaatttagaaagtccaagaccatgctctttcttagagtttgtgtagaacaatgaaggaatggtttaatcaatggcctatatcgagcgttctctataaatttttcttatataccgtccaaatcatatactaattaccaaaatgcgagataacagaggcagctaacggtacaaaataccatcaaccatctcaccaatcgccaaacaactcgtcaagccagggctttcaattcccaacaaattgacaaaaccaggaagaccctcttcttcctggataataaagtcctggaaccccttaccctcattgacagcaccgttcctccctaacttagggcgaataccacagtaatccaacgcaatagcactaacgtcgacaccaggcatataagccttgatctccggcagcgcttgctccaaacgcgcagcactcggcaccaaatcatcaggactatccacccactcaacatccggcccaaagcgaatgcgtccagccatgtcaagagtcaggtgcgtacccagtccaccagtaccgggcaaagtcaccggatataccaaaaccgaagtcctaggcctggaagccgcatacgaaaagtacgtgcccttggcataatgcggaacgaaatggcgctcctttgggaggagcatgttactgatatcgcacgcgccatggccagcactattaaccaacgtctcggcggtaaaagaagtaaccgagccatcctcatccgagacagcggtaatcttatacccgccgcggccgccgtcgatagcctccacacctgtcacgcgtgtcttgaacgcaacatcgcctccgcggtcctcaaagtcgccatgcaggtaagtcatcagagagtgactgtccacaatgccagatgtctcactctcgacgatgcctgcgtctgccttgacgtctggttcgcgctgctgcgcttcgtcacgtcccactagccgcgttggtgcgtcgcctagtccttgtgcgtgcgcgtgcaatttcagacaggcttcccactgagtagggttttgcgccacgatccatttctttgtgttgcgatgggggatattgttctgtgcgcagaggtcgtagaggaggttgcggccgcggatgcagagctgagttttgagggaggtcgctgggtaatagaggcctgcgtgaattacctagttggcgaggggttgctgttagtttgtttgggttgtgttggtttattggaaactgttcaggtgggctcattgtggagattgcatacctcggagttgcgactgctcgtctctgtccctggtgcgtcatgtcgctctagtagaatggttgaggtgccttcgcgagctgcaagttgccgtgcggccgcgaggccgacgacgcctgcgccaattacctttcaatcagattagccttgtgtctgtcttggatctacctaggttgcactataccgcatgggtgaagtccgcattggtgggtcgggtgctggaaaagcagcgagtggggagcttatttataagcttaaattgctgcttaagcagggcacgtgcagacatatcgggagggcgcaattgaccagcagcctgcaaggaaggagccctgaagtgtgactttggtaggaacatccgacctccgacctcgggaatgacctcgggaatgacatcgggcgtgatcccgaggcccatatattggaactcaaaagtatgcgaccctggaactataggaatatcaaaccatagattctcatctttcatcatttgacatctaagaagaagaaaggcaagtccgaatgaaaatgaccgctagtttctgactatacatagacaaagggggcaaagggaaaccccttatgaaagaagagtgaagacaattgtttcagtttctaacaaagactcgacatgaactggagttactatttaactgaccataaatcccatcaattaacctgaccatatcatagtgagcacatctcgagtcatctcaagctcatctaaatccacacttctcacctgaacgaagatgatccaaccaggtatgttctcccgccccgatggctccaacatcgcagagatcgacacgaaggagtttgtccactgggtgacggtagacttcagcaaatttggcggacgaactaggcccaatagcggcgagagcatgatgcgtctgatggctgagcagtgcagatctggagtagccactattacatccgtgcctcagcatcatattcggccatgctgtctctcattgcccgtcgtcggaaatgccgagctcgtacatgttcatattctgtggcgtgcagctgagcttgctgattggcattgggaggagattatggccggtaaggagacgcttgatactaagcgcgttctaggcgatgctccacggttgtctcgtaaaagggtgaatggggcttaatattacctcgatagatgtagtttatttcgaccgatcgatcatagggctatattctgacagaagataatgctgtcaattgagttgtttatcatcaactcaaattcattaataagtgatggtatgataccatatagaatttaaagaagaatgttttatcttcaattcgcataatgctgtgaggtagccacatgcttattcgacgtccatgagaacatcactcattatgtataaaatatacgagaactttttgacgctccacttcccagagtccttgagaagagatgcataatcaagcaggattcgacgcgcaaactgatacccaccgtggaacggcagtcctcgcaagtagatagtagccccgttgcgaatgaagttaacagcgggatcatccgtcggcgcgagagcctgacttcccctaggctccatgaaactagtgaatccctccgttcccactgatctccagtcgacatcatccatcaactccacagacccgacactagacggcgaactagtagaggccggaaccatgaacgtatacagaccgagcactaatccagccgagaagagcgaaaacatagattggaaggtgggatggtcagaagctttgcggtttgtcatgactttgtagatttgtgcagcgtgcaaacacgcgcgtctggcggcaggtgtctgcgaccattcacggatatcgtcaagcgccttacgggcaggatttgggcctgcacggccagctgcaaggtcgaatatttggatatcggcggtgagagtcatgcaaatgttgtgccacgtaatgagagcgttaggattgaggcgatcgagggtttcgctgtagtttgtgatgagctgggattggagggaggggaggcacctggctcggccgtccatggcgtaggtgtgacatggagcaaaggggtagctggctctattggagaggaggcggtggtaggcttctgactggcggagctgaactattgctagtattgcttgtatacagaagtcatctgcgggagcttctagggtggggatgttgatgttttcggatggggcgaggatcgttgatgagagaatgcgctttccgccacggattaggtgtttccattggatggaggagctggcgctgaagagagcttcgctgcaggggaggatgagttggattgagtctgggactgtgattggacccgttgagaggaacgaggagtaccaagagtctaggagcagtaatccaatgattattcttgggaagactattagtgatgtgcgatataagtaggaattttggcatacctcttagttgattcgaccttgctccaggctttccatctcatttcattatcaggaaccgtttcgaacaaagtcatgtcaagaatctgtccttcagtggctgaaaacagaccatgtctttgggcgacctgcataattgtcattagagtcacatcgatagaggaaaacaagaaggttctcttccaactcacagacatgacattgatataaagaggttgacactgttctagatgtactttttcctgcaggatgacaatgattagtacctcgagttcagcaaacttgggctaaggaattcataccccggtcaagccagctaggtttaataagagcaaaactgtcgcaaacaatgtcacggtgccagaagcgctctcaagtcccattgagcatcgggcaaattcagctgttaccttttccaaagtgccctaatgactgtcagtaagctacctgcatatatgacgcgattaacaatagttgacctactgagaaatttctggacacaaacgcagttgttcctttcgtgccaagtaatgtcatgccaaccagcgtcataacatatagtagagatggtcgcaccttatttgccgaaaaggttggtagatggacaaatggcaagaggggattaaagatacggaaaaataaatctagtgccatatccaaaatctcagcaggagggaaatcagagtaattcaatgtcgagacaggcgtggctggaggaatattcctatctgggggtgactgcatatgcgcagaaagagtcatcggtccaaaagccgcataaaggcgccgtctgcaattctcgtcgaatccataccgggatccttcaacagcacttgcctcattgggagggtgtaatgactgaacggagaaaatattatcaaccggcgacatgacgatatcccgccataaactgttaataagacgcccggtattcggtggtgctagccagcactgctgaactctagcgaagcgttcattaggaatgctatcgctgctgtcgactgaatgtcgattctgctggcctgaagtaagattcaaattgtcaccgatcagtggaaaatggctatcgcgcatcagatctagcgagtcaattgaagccgaagctgtgcgtggttcaagccacatttgtagcatgtcttttggcccagggtcgaaggccgagccagctcggtgcgacacatgatctgccgatgtgactgcattccatccaaagtactgctgctggtcatcgatcatcatcatattgagatctggctcggtgcggccatggtgggctgaaatgtcagctaggtaatctagtgatgatgggagcccagttgatgcgagatgcgcatctcgcgaagtggtagacagaggtggaatctgtgcttctgcgccgataaaaccatttcctggtcccgggatcaatgatgcatccgcaattactgatgactgtcgatttgacgcttccgatggaccggctgtcgcattggcttgattgtggcccttggcatgtcggctcaagacatcgctgtatgctcattaaatttaggtatttgaacataggattttgaatatgttacaattcacatgtgccttcaatggaatttaccttcgagagaaacgcttgtggcagacattgcattcgtatgggcgttccttagtgtctgttttgtatgttagattgctcttgcaggggttcgacgtaactgacgcgaccgctcatgcctcttataatgttcggtttttttgaacacccgcgaacagatggaacattttttcaacaccatcacggcgctctcgaaaagatgaatgattacggtacatgtaaccctcaagacttgcggaggggaaaatatattagtcagcaagtccggggttctaaccttggttgactccactgggactattccgcattgggaaagttgataccttagaaagcaggcacaaataatgcgatttatctgaaataaatatattctaacattgcaggcctatctagtctcattttcagattctgggatacctgcatttgcaacaaaggaatagagatcttcatccccatccgacggaagctgaccactgagcatgagcatccagcccaacccagactcgagttggaaatcgcgcgtctcaggctgtgtgcttaaagaccttccattattcgggattatggagtcggatccattaagtgttcgtgatcgctttctgggggggtaactagccccatcgggtccacggtccggcttagtagcacgggtacgaatctcccatttgtgctgtagccttaccagaaggtctttagcacgattggcactttgccaggatagagagaactcatcaagggccctgaagcaggtactcagatgagcgatgatattctcgttttcttcagtttggtactgggaaacggcagcgaagagaagtagtagcacggcggaggatgtaattgagactgctttaatgtttatgcggcggagggtatatctggtctcgtacaatacaaggattttggcaatggagatggcggaattaatgcacatttctcgagcgtgagtgaacccaggtcccttcggaggttgtggttgcaggtagccttttgacatccagggtcgatgactgtagatgagattctggtaatattgcatgctttggggtaaattagcttacgttgtttattagaactttgaatggtataatagaaactcactgaagtagcaacacatgtggaagataaggagaactgtgatcgttaaggtcgatctgtaaaactgaaggcaactgagctttccaactgagaagcttggcaacattatttgcattgagctgttgaagcaaggctcttggaatacctgacgttccatacctgtttcgaggccaaagttagctaaagcaactcacttgagcccaactatatgatgtcgagcgacagcggcaaacagggacggaaacctacagaaaatagccgcagggtgccataagttcacatagggagacttcctgttcactgacagcccccacacagtcaaataacccggaatcattgtcaaatgggatgggagatgcgtagggcgtccatttgcaaggttctcgatagtcgacgtcattattgggttttttgactgtaacatcctccatgttggtgtagaaaggtctaccaaggtagaatccgaccaggctggaatttcgaaaagttaatgatatccttagcgtgtacaaaagcagaatgggaactcactggtctaccatatacgcagcccaaaaaacggttcgacgcagctcggcgtctgcagcggtaacagatccacgagcaacataggaagaaaggtcgatatgcaaggcaagatcaaaagcaagccgaagggccattcctagaattgtaagctaagaaaaccaagaaatttcgacagaactgaccactgtagagccatccacgtgtatctgagcctataccgatttcatggctgctcaagatgactagtgcttggactgttgccacgcatggagagtctaattcaatttcaagcagttcttttgcacggtccccgaagaattcaccgagagactttgggaacgtcacaaaggatggatgataacgggtctcaaaagcagcgccgagagaacacctattttctaatgtcatttcacctttccatttggtcggcaaaaaaatgactcacattgcatagcagagtgcctcggaatagaacggggtctcttctttcccatcccacgcagtctttcccttttcgaacaattctcggtcgacgacgtggaacgaaggatcttgccaggcaaaatagagattaagaagatgctcctcgagagataatgggacttgtctatcatattctgcgtcatcgaaatgatcgacgatacgatgtgtctgagtgttgatagatactggagcatcggcaaggttgaaagtcgatgtcgggccatagaagcgagctcttcctccaggaccaaagcgcaatgtgcccatccgatcagaaatctcgtcgataagatcttcaatttcttccgtgctcctggaatcattgtcgaggctgggtgggctttgaatgacggcggactcaaagggctcaggtaccctatccaatggtttccctggcggctgtagtggttctacgccaatgtctccgatgtctggagatgggggcgtaatgcatgtctcaaagtccaaggtccagtcccaattggccaataaattatcagagtgatcatcagttggtggatactgttctgcaatggagatcccagtgtcaaggaccatgggcagtgtcgaaatggcgtgagggtccgaaagcattgtaaaactcgaccgagaattttgcgatgcgttgtccggtgatctcgaggtctgagcccaagtatttagatcattttctacaccaggagctgagaacggcatagaattcggtgcctcagaaggcagatcatcgcttgcagatggggagtttggattgggggatttgctgttagttcgattgtatcttgcggctgaatgaacttcagttaagccaagaacatcaaggactttagccaaagcagtgtccttttcttgtggcatgggcggggcctccaatccactttcgtggatgaagagacagagctgttcaactctgcttgatagaagctctatggcaacgcggagtgggagtcttcacatccataatcagcactattacctagccagcagccttcctttaatgaaatgacttttgatgcgtcacttactttctcttgtctacggcctggtatcgacattcgcggtgcttgttcatgcagctggagcattggggcttaccgccgtcacactttgctgacattagcttcattttgtttcccaccgaggtaattgatagtcaccttgaccttactttcccgacatgacacgcatgccatggaggcatggtgcctcctctttggggggacactgggctttggcatgtttttttctggatgccatgagactatgcgcttgcaatatcctcgtcccttagcaaatagagggcggcttaacctcgggagggatagtgcggggtaatactaaaggggaaatgtttgatccgaactatacgtcgtagcttctcgctgctatttcattggctctaccaaaagggggaccactatcgacccgtgtatttgtatttctggggcctcaagtgggggatactcgtataagtaaaggatgaatgacatcatgcatgatcgacagcctcgttggcgaacgagatgtcgtgcaaatgtcgtttctttttccggggaccaatcgctggtaaaaccggggctggctctaacctaatccggaatagaccgcctctacgggaatcataacccggtgtgggggaccccacgttttctgtaacaccccaggttttcagatgattagtaggattaccgtgtagtcctatcacataatttagatttcattgaatataaatacagatatgaaccgcacacgagtggtccatgctaagatcgtatactggcgatattgcaaccctgctcatcatgtttttccagaatgcacaagggaaatggcttcaatacagaatcacagcagcctgcggtgccggtttcctcctctttggctatgaccagggagtcttcggcgggcttctggacaatgagccgttcctcgagacctttggaaatccgggcgtgaccatccaaggtcaaattgttgcgacttatgacattggctgcataataggcactctggtgacgatgttcgctggagacaaactcggacgaagacggacaattctgatcgggtgctgcatcctgatcgtcggcgctattctccaaactgcatcctattcccttgcgcagatgattgtcggtcgtgtcgttgcgggagttggaaatggaatgaacacaattgctattcctatttggcaatcagaaactgcacgggcagagcaccgtggaaaactcatcgttgcacagttggtaacgaatattttcggcatcgtcatcacaaatgtaagctacttcgttcacagtacaagaccttggagcaatgctgatttttttccctatcgcagtggatgaactacggattcactttcattcctcactctgccgtgagctggcgattccctctgggcttccaatgtttcttcgcgcttgtcactctcgcttttgttattgtcgccccggagtcaccgcgttggctggtcatgaaacaccgtggcagcgaagcccgtgaaatcctagcacggctccttgcaaagccaattgacgaccaggaagtggtggatgagatacaaaatttggaaatagccgtgaaccatgaaaccgaagtccaacaatcgaagcctttgcaggcaatcttcaagcgcaataacaagcaacagacattgcgcaggattcttcttggagctggtactgccttttttcaacaagttggtggaacgaacgtcattgcatactatctaccagtggttctgacccgatcagttgggttggacaacagaatggccctgatcttgtcggccgttgactctatgtcgctaatgttttggggatgtattgcagccctgctcattgaccgcattggccgaaagagattgatgctcttcggtgccgctggtagcagcgtctgctttgcgcttgttgccgttggactgcggtatggtggacccgacaacaagggtatgtctgttctagccgtggtgttcatcttcgtctactacgtcttctacggcatgtcgctcttatcgatcccgtatatctatccggcagagatcaactcccagcaaatgcgcaatattggcacttcatttgcgaccactaccaactggttattcgtttatgttatcgttgttgccaccccaacagccatcgcaaacatccagtggaagtattatatgctttttgccatattcaacttctgtttcctgccaatcatctggcacttctatgttgagaccgccaacctgtctcttgagcagattgacagactctttgagattaaacatgaggctgggaaagcaattagctggtcggaggcaaccatgatagcccgtacagaggtcatttccgatttggcacacaccgaaaaggaaaatcttgatgctgagcactatgagattgcggcttgatcttggaataggtttctttagatgttgtacatgtgtataaatgatgaacagctgtcgggtatctcgaatataattatttataagctttgcggggtaacggctaatccataactcattcccgagggcttttctctgtgaagccgcttgaaaagtctacgtagcaaattcatcttcaaagcagtttgctaatttgagctacttctcaatgagattcttttcttgcgaccagggggcgtcttcgtagaaagaattccactagaccaaaaaaccatgatctctatttatggcctaaaggagggctataattgttctgtttcttgtcaatatgcctatcttgacattggcgtttctgaggtaaccaaaaaagtttagtgacacgataatgcaattgcagtaatagtctcggttatagcaagtcccagttcaactcggattccctttcccggccaagccttgtatccactccaaactacgattgtgtatataaccccgactaagctgttgtcgaagcgactactggaaagcatttctcagattcttcaactcttactactccttcaaatatcccctcgtctcaagatgtcagccccgaagttgcgcgtcggtatcgccggcctcggccgaatgggtaagcattgttccccaatcggatttcgaaaacctccaattgacacataacaggccaacgacatgcattgaactaccacgtttttactcctcgtgccgaggtggtagcagccagctctcctgatctcaatgagcacgtatgggcaaaagaaaacctcacaggagcaaaaatctatacagactactatgaaatgctcgagaaagagaatttggatgctgtagtggttgctggaattactgccgtccacgcagatcacgccattgccgctatcaagaagggattgcatgtcatgtgcgagaagcctttgtctcttgacgtcaagattgtaggtcgttctatataagctccctatatgaagacatatgctaaccgcaacaggctcaatccgttctcgatgcctacaacacatcgctcaagacacaccccaaccagaaagtcatgtgcggtttctcgcgccgctttgatgcttcctaccgtgaagcctatgagagaatgacctcaggccaatacggccgaccagtgatcttcagatcccagactgcagatatgctcgacacaaccgggatgttcgtgcagtacgccaagaccagcggtggaatcttcctcgactgctccatccacgatattgacctgatgttgtggttccttggtgagaccacccatctcaaaagtctgcaagcggttggagtcattgccgtccacactgcattggatgcgagcaaggaccgtgacaatgcggtagctacggtcgagtttgacggtggcaaaattgccacccttttctgttcgcgtatgatggctgctggacaggaagataccaccgaggtcatttgtgagaagggctcattgagagtgaacatgcaaggccggaagaaccaccttgagatccacgatggtcagggagctagacgtgatcttcccaagcattactatgagcgtttcagagaggccttcctcacggaagctaatgagttcactgctagctgcttggataacacgcctcctccagtgtccctctcaagctcggtgaaggcagttgttattggcgcggctttgcagaagagcttggttaccggtgaaaagattttttttgaatctgggaaagaggctagactttagtgtaggaagaagctgtccaaaattcaaataggtattcattcaatagacaagtgcttttccgattctgtacattctggacttgtttgtttgtatatgtctcacttcgcgtcacacatgccaccactacattatctacacacgtacatactgatgccagctctgttttttgtgtgatatttgctcgtctatataccatgtgccaaacttgcttgatatcagtcaatttatggagctccatattctgattcttaagcggagatttgtgtacaataacatacaaacaagacagtcaccgtacagatctcatgaacttatagaccattaattcacttagaagtgccaaagtattgatcaagtctagagatactataagatcaaagggtagatatagtcatggctaataaataatcctatatgttgaacgatagcatcaaaataatacccccccaggtggctgtggccctgtggcgtgcacggggcaccgttatctggggggggggggggggggggggnnnnnnnnnnnnnnnnnnnnnnnnnnnnnnnnnnnnnnnnnnnnnnnnnnnnnnnnnnnnnnncgtgggggggggggggggggggggggggggggggggggggggggaaggatgcagcgtcaagctgccccaacgtctgagccataaaatgctcgtcggtcgaccctccctctcatcaaattggaggttgactttcttttccatctaagacctccccgacaagagggcaatgaatctttctttcttcttccacccatggaattctacttctttttttttcaaattccaaacccatggaagctttgatggcagactaatctgccagcgtgattgcaatgatatctctcttcaacacttattcttcttctgccttcttctatagtgtgctcgctgcctcacggggatttttctttgcatctttcccccgtccacctgtgccgtgagcagacaatctccagtatatcagattcagacaaaggtacggaccctaagcctaatatgtcatcttattagttgactacagcctacgattgaattaagattaatttacttcgacgaaacgagcttctatactccggaacaacgggaaatcaatgttcaagtggtaaatgagaccaatgaagtgatctcgacattgattcagtctgaattcgaccaactgattgatgaaatcgaggttgctgaagaagtcgacatacttgatggaacgcatgacgaccaaatggaagaccaattgatgcccgaggcagaagcaacagaaacagacgaaatccttggcgatcagccagcaacaccagacgaaagcgaaccagacgaaatcctcggagaccagcccattacgccgtcagaaaccattgacgatcaaccacgtgacgacggtctcatggtattcattgacaatttcaacgtcaatggagatgattacatctctctctaaaacgaccattctcacccaatgatgacgacgaagaatcacctgacaagaaacatcggacgaaccttattctcacctatttacgcgccttttcaacggcatgactctctcaaccaaagaagacaccggttgatagtttgccaaaagaaccagacaactggtcagaagcgcaattccatgcccataaagctgaatggcaccatgcaatgcaggttgaatatgacaagctgaatgagatgaatgcttggatgtctgagaaactgatcaaatgagattggcatttagaccaatgttggaccaatgtggaaaaataccccagaatgcctgccctaggcatcaaattcttccaatccgatgggtattcaaatacaaatcagacgaaaacggctttttgacaagtttcgaagcacgcatttgcgttcgtggcaaccttcagatcattgaagacaaagaagaggttagggctgttggagtgtggcagaactaggcacgatgcttcgtaatgcactctcgatgggtcaaatgcgtagtgtttaaacagataaacagctaggcggtctagtgtcaggtcaaagatgagatcaaagtgtatgttctgggatgaaatagtcaatttgtctaactaatattcaatacaatttgggctttcttataggagtcaaacattccagatagctcagcaatttaaagatcagataattcatgactctcttcagatgtaacaaagcaagacgggatggaacaaaggaagcaatcaatggcatcactaaaacaaggaacacatatattctgacacaccccttcagattttgaccttagtcaaaagctgtacacatgggataaaataagaaaggagagagaagggatcaaacattgtcgaattcggttacccgattaggcaattgtctcaaattcagttggttcaagaattcaaggtatttttgagacgaaaggtgttttgtcaatccgtcggcgatcatattgtttatggcaatccattggagatatatatctccatttcttaccttttcacgcagccagtgcttagttattgatgtgcacgtgatgtaatttcgtctgatatgacgaatttgacttcgttatcagatcaatggtctgtttattatcatatgataagatcagatcgtgttcagtgtcaaactcaatggaatggagcaatcgtttcatccaaagtaggtattttgctgcttcagagagtgcaactaattctgcttcggttgtcgatgtggtaacaatccgttgttttctcgctgaccaatcaattggaccactaaaaagggtgaaaatgaagccttgagagctttttcgtccgatgttatcagcaaagcttgcatctgaagctgctcggaacacattgaggatcacatgatccgtcgaattcaattgaatggtatctggtcccatacaggtatgagattgtttgctctgcagcgatcacgtgggcccttctttctggcttagtcaaccattgagaaagcattgatgtgcaaaggcaatgtcgggacgtgggttgatctcgcgggctataggttgatttagggtatttcaagcgataaggaatagcttgaagcaagaagcctgcttctgttttctgtttcctcaccacagaaaatggcgctgaaactcaaatgaaggggcttcctgccaagagctcagtctctccactggagcactctctttatgtgacgacccagggaccggatggttcggtgtctcactggaagtcccatcgacctttcgagttgtaggagatattggaaccgaaccatggagcctgtcattctgtgaacgctttttcttctccgaacccaccatttcaggctcagtgcaagctttctgccacctccggataccgtgagaagtatcaagagggaattgcgaccaagtatcaatcccccccttctcaagtctgggaaatggcacatacgtgccagcagcgtggcctcggctgctctctcggggaggaatcgcagccgatagctgctcatcagagacatgcggaagcaaattcaaaagaatgctctcagtgagctggagtcgattctccagtgcttcggtataccctttctctggtcctcttcgaagctgttcgggccagttgcacggtcggttgttctcaagacattgttcgcaaacgggtttgaggccgctgcacttttgctttctcgagcgacacgagttgcaagcagttgtgatacgtgctggtcttttctcttttgattttgatgccatcttattttcttcttgtggcaggtcaagaggtatgaggggagtggggtacacgcagcggtaaacggcagaccccatcgcctgaaagttctaccgaacgtcccggtttgtcgctacagcggccatccggcgaaaaggcaggatgaactatcagccacctttaatcgccgtgttttatatatagtctggacatccatctgcattcaatttactcattacatcttccccagttccatgcatatttcctctttcaatatggcaccaaagaattcataccgcattgcctctatcccaggcgatggcattggtctcgaggtagtcagtgctacaatccaggtcgtcgagaaactcgcaaagatccttggcacattcaagatcgactttgagcatatcccgtggggaaccgagtactacaagcaaaccggacgatatgtgtctgaagattaccttgacaccatacgccagtacgatgcggtattattcggtgccgttggatcacccggtatgttttctatattgcatagcatcatgccgactaccaagcaaaaatattaacacaaacagacgtgcccgatcacatctcgctctggggcctactcctggccctccgcggcccactccagctatacgccaacgtacgaccagttcgaactttccctggaaccaaatgccctctcaacaccgcaaccgaaggcatcgactggatgctcgtacgggaaaactccgaaggcgagtatgccgggcaaggcggacggtctcacgttggacagcaatgggaagtcgcgacggaagtggcaatattcacgcgcgtgggaatcgagcgaattatgcgattcgcatttgagacagcgcagtcgcggccgcgtaagcttctgaccgttgtcacaaaaagcaactcgatgcgcaacgggatggttctgtgggatgaaattgcggaattggttgcgaaggacttccccgatgtgacctgggataagatgcttgttgatgcgatgactgttcgtatggtggcgaagccgcagtcaatcgatacgattgtcgggacgaacttgcatatggatattttgtctgatcttgctgctgcattggcgggatctatcggtgttgcgccttccagtaacttggatcctacacgcaagaatccgtcgatttttgagcctgtccatggtagtgcttttgatattactgggaaaggggttgcgaatcccgttgctaccttttggtcggcggcggagatgcttgtctggattggtgagaaggatgctgctgcccagctgatgggttgtgtggagcgtgtctgtgctgcagggattctgactcctgatctggggggaacatctaacactcaagggattgtggatgctgtttgcctggagattgagaagttgtgaaagaagatctgagacaattcattgtctttccttcgttcttttcttcttatctttgtttctcaatgtcttcgtctcaggtcatctgaaatatgactttggatgaactaatcagtcggccctgcattgaatatcgatagacacaaaataccaaatgatgaatacagaaactgatttataggacaccttaagtagtgagcaacgcgtcttccagaattgtccagaaatatcagttatctgtcaaatatgtatgaatatcataaagaaaatgtcaaaggcatctcacacaagacggaacagatcagcaggcgatgaactaagaaatccggaaatgtcattatagcaatatgacactgttttcctcatataaaaggaatggtaacaatatcagtatgctgttgtcttaagagtccaacatttaaacgggcttcagcacccttcatagtccttcagaaagcactcagacgggccttcaaacaagccaaagccccccgaatccatctatctcattgatcatcaaaagcaagatttgtcccctccaactacaaacctaccaaccaactaataatatccaagggatgttctaccaaaacggaagattaatccaagagctcgaatacaatccccgaggaacgaactgggtgaacatattcttcaatgcccgcgactacagatgcgatgaccttgccataatgcgcacagtcgtcacttgcatccgcacaagagtcgtcagcatcactggccatgctatgcaccacgatatcccactctgcatctcgatccaagttcccggggaacatggtgacaaggagtcgattcttgctactgcagagctattggcggaatatcttcggggacaggttgctaggggctctgttaatattaatcggtctttgctctttcggaggaggtagtgtttggtctttgggaaaagggaattttgatgcttgaagtggttagagcttgtttggaccggctatttgatagaatgggaagttggatcatcctgaattgtccactatgttgtcaagtatctatactgtagtaattcagctggtaacttgtataggtagtcccggggtcatgcatgcacacgagccttgatatctatatctatagtcaggttaaagcactaaacggtttgggattcagagacattatgcatgatgttaagtggcataccaaagacataaaaatacagacgcacaaagatatcggggaatagatgaaaggcttgaaaatgacattgtatcatgactcctttgttcttgcctagatagactcctgactataaacaataaagaaaagagctactaggcagagaaagtatttaaacacaacaggaagggactcgaaacctccttcttatctttcctcccttccctcttaccacttcacagcaaataaccacaaggtaagcaccccccaaatccaaaacatggccatcctcaattctaacctcacaaagatgcagagcatgttctacttcgacggggagctaatcccagagcccgagtacgatccacgccaggtcagcaactgggtgaacgtcttcatcaaggcgcgggattccaactccgacgacgagactctaatgcgcaccgtcgtcgcctatatccgaacaagcaccgcttcgatttccgtccatgccaagcatcatgactacccactgtgcgtctctatcaaggtgcccggagactaccattccaacaaggcgtctattctcgccgcggcggagctgcaggctgactactattgccaggagattcggaatgggagagtgcgcatcaaccgggctttgcttttccggcgtggggtacaagaccggcgccggggttgatggtgcagatggctggtttatggcccgaatgagaggctatcaatacatgagcgtttgagagaaatacccacagcgtaaacaatatgcattattttggttggtcttctttgatatcattgtagattattttctgttttttctgagttgtgggtgatagcatggtcttagaagcttgggaattgctgtccgatcatatcgaacagagtgtcaaagttagcgccctcgattaaatccaccatgttcaagtcgaaattagatgaccccttgagctgtgccggatctgtgtcctgtaaatccatttgcgttgaagaggatgtatcggtgaggatgccctgctcgttcatttgtgacgggtacattgacgtcgaaggaactactgtaggatcatgtcctctgtgcatggattccacccatgtgttattccgtgactcaagctcggacgcccctgcgaataagccaggctcttcatgcaagtgcgacagacgaccaagtctctgtctgttctcctcccgtgcggttgaatattccacatgtgtgggacttccctcggagcctctcatcacatatgcttgtgattttgctgttttatcggatccgctttctgactgttggatttttgcagccagcactgaaagcgacatgtggcagtgtttggctgtctcccattgagtagacatcaaacgcaagaatcccgaaaattcatcaatttccctatcaagcagttagtacacacacgtagtgatcagttcgaaacctagcagaggaaaaagaaacaccccacgtactgaagaccctttgtcaacacatattggttcagttggcaagctaaagccaacactaacccagacatccacgcagccgacaaaaaaccaggccagaataaagcctggtggctatcaacttgcaacctcagccccgaaaggatagcccgggcagccccgatgcaggtttgcaatccagaacagaattcggcagttgacggatctagggacagcgaaggtcgatggataatcagaatgagatgctgatacagcacagtgaaaaaaggagcaaaatcaaacgcactgtctggcaatacagacctcaccacttgttcagataccactggcttgatttggagattggtgggaaggcaattccaccacttatgcacgtctgtcacgaggaacaacaccgagctgcgacgaacagatcgaaccaatattgatttgtggaagagctccaatgcccgacccgtcagggtccccgagtcaacgtagctagcaagaacactttccttgctgtagtcttctttattgccgtgctgcggcgcagagctaccattcgcagagtggccccggggggaatgcaattctcgggcggcaggcagacatacatcgatatcggaatcttgtataccaagcggcaagcccaaagcctggctcaggtatctatctatcgcataagcacaccaaaagacccgcttccgcaattgtcggtcgtgggtggagagttgcttgtatcgaaatggacaccggtggagacccgcatgaagcatcgagcgtaggatacagcctccgacagtcgatgctggtcgaagtgacatggtcgcaacgagatatacttggatagctagaagcgcttgcagggatacgatatcatgtcgagatgagagagtcccaagcaaagagttgaaactggccggtgattggatcttcgattctgactgtagatctaagtcgggcgctagaaaaatgcctagattgaagacacattggaaaatgattgtccagcacgtactccgatggtctgcacagggttcctgcgtgtgctgagcttgattcccattggagtaaacgttctccattgcctgcaggaaggtaggaccatgcagaaacgggaacagtgggtgccagactttgaaatacatcatcatcaggcccctagccacatctgggggtggtagattccccagagatgccgtcaatgatcggtcgtaggtccattttggggaagattcgatcacccgcaaggacgaagcagtgtctctgacatatgaagtgcgctggcgcttgtcacgaggtgagccttcggcgcctacgagcgtttcctctgctgtggggagattggattcaggtgaccccgggccatctaagccgttgaatgcacgttttactgtcttgatgaaatagacgccgcttgagctaccgacgaactggctatcctcattcgagtgtgccgtcaaagaaccaatttcagatgtctcgggtacaaattccgatgccattgtgcatataccatctcgtgagtatgagatgttctctttaaagctcgatgtgtttcgacagaatcatcacggtcccggagtgatggagacatgctgagtcatcgtacgagacggacaataactagcggtctcgggaaataaagaaaacatccgtctacggtcgaaaggaacttggtgaagcaaaataagtcactgccatcccattgattgtctggcgctgctctccggaatccgataacaagggagaccaggcttttccgtgaggaatttaaatctatctgacagaacacaggcggtagggagaagtgcggaaagatgataacctcacaaatcctccggaaaaagggaaaaagaaaaaaaaaaaaaaaaaaaaacaaaaaagaccttggtgaagcaaaataagtcactgccatcccattgattgtctggcgctgctctccggaatccgataacaagggagaccaggcttttccgtgaggaatttaaatctatctgacagaacacaggcggtagggagaagtgcggaaagatgataacctcacaaatcctccggaaaaagggaaaaaaaaaaaaaaaaaaaaaaaaaacataaacgacgacggcgaaaaggttgactgtcaaaggaaccacacccagcgcctagaataaaagacttttaccaatgccaaccaggagacaactcgatatagcccagtccaagtggaaggtaagggaaatagcgcatactagggaaaccggagaagagagaagaaaaaaatccgaatgtcataccgcattcactaaacaccaggaaggtgactgcctaagaacaaacttttcgaaccgagggatatcaggatcagagatggggagatgtaggggtagaaagggtaaaagatgggaacaaataatgataagagaaatgaaaagtcgtcaaaaacgtgcgtccaagatttccgagaagacaaagagtgaacacatcaattaagacttgttctcctcaacaggggcctccttggcggcttcctggggcttgggttcggtggtctcgccatcacccttgttcttcatgtactcatcatagacgttaagggcctcatcgaccttgccgcggagagcctcctcatcatcgagcctggaagaatgttagtaaatcttgtcacacataactcaaaaaaatgggcagtgtaacttacaggccaagcaactcagcgttatccatctcaagaagcataccagtgatcttgccagcaagctcgggctgctgagcctggatcttggggtaaagagcctcgccgagcatctgcttctgctgagcggggggagcggtgagaagagcctggttggcagaggcgggctcgccaccagcgggctgaccaccaggggcgggctggccgcgaccaccaccacgacccatctgaggaccaccacggccgaaaccggggccaccacgcatgttcatgggcataccgggaacaccacggccaccgccgccacgtccgaaagcctggggcatagggtagcccatgccgttaggaatgccaccaggggcctgcatgcccataggcataccctggaagttgggaggaagctgttggttggggggcataccacgaccaccttgggggaagggaccggggtactggggacgtccagcgggcatgttaggcatgggcataccgccctggggggcgaatggcataccaccacgctgtccagggggcatgaagccctgctggccagcaccgtagaagacggcgggctgcatgaactagtcaagttagtaattgagcgggctgaacaggaaagttgcaacttacaggctggggcataccggcagcggctgcggcctgctgctggcggatagtgttgcgagcctggatgctagcctcgagctggctgcggcggacatccttgcgctgagcgagagcaacgtagaggggcttggcgttgaccatacgctggttcatctcggtgacagccttggaagcctcatcggggctgctgaagcagacgaaaccgaagcccttgctcttaccgaaggccttcttctctgtcttcttctcctcggtgtcctcgccctcctcctcggtcttcttctcctcggtaggctcctcagtcttcgcctcggtgctctcctcggtcttcacctccttctcctcggagtccttggtctccttgtcggcctccttctcctcggcctcgggggagggagaacgttcggcggcatcacgcataaccttggcggaagtgatagtaccgtaaggagtgaagaggtcacggagcttctcatcatcaatgtcgtcggtcaagttcttaacgtagaggttgacaccctggtacttggaggccttctccatgcgggcagcctcgtactgcttgcgcagctcctcctcacgctcgtgcttcttctgggcacggccaacgtaaagcttctgagtcttgacgtccttctcgttcatctcagccacagcggcctcggcgctctcgtggttggcgtagttaacaaagccgaaaccgcggctcttgccatcctggtcgtggctgagggtggcggaggtgatctcaccaaaggcctcgaacatgacgcggaactcgtcgtcggtaatctcgagatcgatgttcttgatgtagatgttggtgaagttggccttcatctcctcgaacttgctttggcggtccttcttggagatgtggtgtccgacgaagaccttcttgtcattcagcagcataccgttaacgtgcttgatggcgttgttggcggcttcggcggtctcgtagtggacgaaaccgtagcccttggagttggcgaactcatcctgggcgaccttgcagctgagaatgttgccgaaggcagcgaaggtgtcgtggagagccttgttgtcaatggcgttgtcaaggttcttgatgaacacgttgccctggccagtcttgcgcagagcggggtcacgctgggaccacatgatgcggcaaggctttcccttgatgagagtgtagttcagatcctcaagagcacgctcgccgtcagcggtgttgttgtagttgacgtaggcgtagcccaaggaccggcgggtgacggcatcacggcagacacggatagaggcgacctggccgatggaagagaatagctcgtagagcatagcctcagtcacggaggggtcaagctcgccgacgtagagggaagccgagtggggctggttgttggcagcatcaccggcggcctcggaagtggcctcgacgggggcgccattggcctcaggggtagcggcgacaacgttgtcagtgacaggagcggtggcgggggcttcagcagacatgatggcggctgttttcactaagaaaaggaaaaagttttagcatgtgcatgccgagcctatcgcagagagggggagggggaatcaaggaggcatatgagataaggttacacggcagttgatgcagtctatttagcaagcaaccaaggggcaatgagaaaaaaacgagggggtgaatcaatgaaaagggaggggcgccatacagcgaagtatccacgaaacaaagagttcagagaaatttcacttgagcagagagcactagtagcggattagcgggggaggagattcgaagtgtattgcatgcgcgatcgaaagagaagaagcagagatgacacggttttcaaccgagtaaaagagtggacaagaaccaaagtgactaaccaggtgaaaatgaagacgatggaggcgttgaaagaaaatcttccacacaacacaccgcacaatcaggaatgagataagataactggaaaaagtctttttctgggtttttcgtgtttttttgagattttgtatctttcgatttaaggattcgaaaagaaaaggaagacttttccctaaagaaagagagagcaacagagatggagggggaggttgtaagaaggaaagaaaaaaagttgagccgttcaaaagcaattggttctggaaaactcagaggctgcacgagatggggacactagtcctgtttgggaaaaggttgccgctttaagggcttattaagtataacctcggatggatattgcaagataaaagaaagaatatggccatgctatgcatgcaaaaattaatcatagacacgcggtctacccaggaaatgtacaggaaataatgactgaacaccccccttcaactcagatcaaacccagctcccgaattcacagcatataaaagcttgctcttcaatgtctctgcatcagagtaccgtggcagtttgagaagattcacacacgtactggtactcggcaatctttcctggtcctcactggagtctctaatgctaaagttgggacgaaggtggctgaatcccaacaacggagctcgaggggtagacgtcacgaaccggatgaccctttgtcgctcctcgttggtcaactcatgcataacctgccagaacagtgcaatggtcgggtgttctagatggtcatcaccaatcacatacacacctccgtagagggtattccgtcgcaagtcctccacatcaatatcagctttgtctccgctcactaaagtttgcaactcggattgattgaacatggatagccaggcgggttgaatgatctggcccagaccttgcaaaaaggcgtttgtctgtagagcaggttgcaactgtagacgataacgagccacgtaggaaatgtagaccaatctatttttgttcgtcacagcggtctgtgagccatttggtttcagttctgcggtgacagtgcggttgcctccactgggcatccgaattatactgttaatggtgaagtcgagaccgaagtcttccacgtttccgggataattcttcagttgtaactggtgaaacagattggtcagctgcaggttcaaaaaacacaatcccgaccttgccagacgataccacttaccaagccttggtataacccctcatcaaggtccttcagatcgttcaagttggcacgataggaagattccttcactgcagacctagagcctcctgtcaaggcccacttcaagagaaagaatggggcaaaattgacatcgaccaagatcccctcgtaaagacactttccaataatccggccgaggaattcatatcgtcgaagaagaccgcgcacgtcatcctgccattctgggcttgaacttgtgagcccagcctcgccgagaactgttttgagttgggcaaccgctgtcgggctgggatacagcagatggtgatcattttccgcaaacatgctttcgtggtcatcagttttgaaagcttgggtagtgatactggttaggaactccttcgtcacaccgccaccatcgatgccggcttccattgctccaaactggtcgataaaactgatctggattggctctttgagaccgtcacccaagccatagtattgagagaatgcatcttcaaatacactctcacgccggatgtcagcatggtgtcgagccaagatatccgccgcaccctcaggaggtccatttatcatagcgttttgggccacagacaaacgccaggactcagcatccacgaagcctttccggcgacgctgttgatccctaaatatgaattgacggaagatctgcactctcgtggcaaatggtatgaagaaaggcatatttcgaagtatttctagccgtggcgcaatggcggctagagcattattatgagcttgtcttctttggctatttcgcatggcttggagatgaattagtcgtcgcgcatggctattgccgacaaggtgaggagactctgggtattcctcatcaagaagatcaggctcagaatcttcatcttcgtcctggaattcatggcgtttctcctcttctgccacaacagctggaataaagccttccatgtcgaatcgatctgtcatcaaccaatgattttgtggaaggaatttgcgtcgagaactagaagcgtgtcagctagtgtgactaaatcatagcaaatggaacgtttcaactcactctcgctcatgtagcattctgagcaaacctgtaaccaagcctttgaagtagtcaagtgggatacctgtcacaccaggaagatcattgatttccttcttggcctccacctcagaacgctctatcgtcccagaaacctgagccgtgttgttgaaataacttctaagatccacagcggatgatggaacgggccctttcttggtcaagtcggcaacattccagtagagggtgaaggcgaggtttttgagaaagacggtcatatccttaatgtctttaagtggcagtgcgctctctttcgtccacgaagacaagacatttggtgaagctgtaaacggtgacgcgcttgagaagaactcttcgtcatccatgactttcaagaggaacgtgtaaagctcaaaaaagagcagaataatcgtccactcctgttcttgatcctctctatccccatcttgaggcagttgcagtaatggaagaacttgggtcgagtccttgctgattatgtcaaagatccggctggattttgatgcctgccagaaatatttgatcgccggtattttcacacctggctggccagaagtgggacctgccgaaggcgccgagcccaggtacaaccacattcgaatgtcgtctccacggcgagggaacaccctcagcaaattcagggcataggtagcaagaatcttggcttctctcgaagcgttgggttcgttgtttggtaagtctgtgtaagaaagttgggacttttcgatgcgagaaagtagccccgtaatgctactttggttgaccaagctactgacttgatctccgatgaactgatccaaataaggacccctgattggatccgagccgttctcgtccgcctccaagcaccgtgtcagatagatagatgttgagttgagcaacccagagaccacattcaggaattcgagatcaggtgtttgcaagttggcctgccctggaagagcatatcggtgaaagaaaatcaagtacgcaagcagccaaaggcgactctcgataccctcgacatcgtcggcagaaaggcgttctttggtcaaagaaatacatgattcgattgcaggtgccagtaatttgtagttgatttgatgcgccagtccattaagctcaccgagataagtgggcaggttcggaatagtgagatacgacatagcaagagcttcatatgctgtcatcgtttctggggttattggtctcagaagagccaggacagcattcgtgacatgctcgggtgacagggtaccttccaagatcttaatgttctttgtcaagaaggccatcgtttgatagtattgtttggcaattgttgccatcctccttggtatcaagtcaatgaggaagactatcgtccgaaggaggggcaggactgctgcttcatgagtcgggctgtcttttgctgagccgagggcatagagaatagcgactgccagccgtttcaacagctcggtccagtcattttccgtagcgatcgtggggagagcatggaaggtctgctcaaagacattgcagaagtatactagacgtagaacatcttccttcttccttaccaatcccacaaactgaaccagaagcctgagctggtctaagcattgcttcgctgtgggatatggcggtgcggaaagacgttctagacactccagacgctcaagctccgtcgttgggccccggtcatcgtcgaatcccagggcactaataaccctttcccactcaaaattatcccattcggacttccagcccttatatgttgctttcctgctctgatgaccccgccaaactcgctgaacggtgcgagatgcggtctgtcgatctctctcatgttgtctcagggctcgctctcgctgggcaatggcgactgcgctctcggggttcacagcatgaggggtatgtctagtcggcgagtttccggggaatgcggcgaagggattagtggctcggccactgaggttcacttgccgtgggcgacgagagttgcccgtgaaggattgaaacatggttgcagcaggagctgcctgatgggaggatggccagcaggctagataaaacgaaccctctaaacgcagagaagcaaatcaactcaagcccgcatcaccgtgagggaaagacgaaaggtgaagaactatgacatcgccgtcgccgggtgccgatacgggagagcatggcgggcttatcggacttgtcgagcacagaccacatctccatgagacctgagcactatgtacatattgccactggaacattctggttttaagctgacataggtcagagtgaaccatataagacatacgaaaaatcctttgtagagaaaaacaaacaatgtcaaaagaggcgaaagattacttgaagtttaacctgatattcatagaatttgtcaaaatactacacaattgctcctgtctcggtgccaaatggtacacgtccaccgatgcatcgggctcctccgtggtccaaatcaagttgatgttgtagagactataatacatgggatatattcaatcaaccagcggagagaaggttgatcaatgaaattgttgaatgatgcccggaggtggttgttgtggatggtatgccgggccgctggcataaaaattagagcactctcaagcgtctagattgctgcgcactcacatcatttgaaaacacgtagaaaatccccgctatgcggtttcagtcttttggaatttctagaaaagggtcttcgagggattgggcttggcagtctcgggcgtttgggccaggttttggtcttcaatctgcttagtctgcttaggctgcggcgttggcttggtttcaagcttcacagtcttttcgatgtggggttgtgctagtcgggcctcttcggcttcaacggtctcagcccacttctccaggtagtccttgccctcaaatcctctgatcacagtaatctttcggccatttctctcgatatcttggacgtagttcgacggtgtcttgcgcatgtgttttgtgatgaagggggcgagctatcgccatgttagcagatccaacatttcagtcaactagtaccaaatggttctcaatgctcaccatgaatggctctttcgcagtctcggcgtaatgtgccctgccaggaatttcaagcttttccgcaggcatataaacacggtgctttgtcatatcgggcctgtatgtgcctctcttgtcaaaatgacccatagagccggtccggtttcccttgtagtagccgccattgacctgcttcgtagtcaagcgcaaacgcaccatcattggctgcgtgggcttgaacattatggcgacagttctatggccttgaagttggaacagaagggggatagagcgagtcgagttgtcccggaggaagatgggagacaaaactcgacgaatgaacgggtcgcgctaatctccgcgccgagaactttttttcccggcagaaaaaaagttcaacaccatctacacccctcttgaaagctgaaaacagccatcagatcatttagtactattttagtactgatctgaagcttctttcttagtcgtgaattcgatttcttaactcatacgccagtatgcctcgcagccagactcagaagcagggtccgaaagaccgctcgacgcagaaatcagcaccgaagcggaaaagcactcggtcgctaaatgcactgtctattgcagagaaaacaattcacactagattgggtgttaaacgcagtcgtcttggagcctacgatgatggtaccttcaaccgcaggagaaacaccggtggcgatgacgacgacaacgacgaggaggataccgccgcccaatacaaacgccgcagaaccgaggacaccggaagccttgacggtggcagtgacagtgaaggacacgaatggactctcggacaagtaaatagcgataacgacagcgaattggacagcgacgaagctctcggtgagagcgacgaagagcgattcgagggcttcactttccgcgcatccaagtctaaatttcacccgaaaaaagcgccacccaagccaaagaagcctacggagatcaacttgtctgaagatgtcgacgagtcggatgaggaatctgacggtgacgactacgacgaggacgatgatctgggagaagacgccgttgaccttgctacagcctgggatatgaatgcagcggccgaggaggaggaagcccaggaagcagctgcgaaatccaagcgggctgcgaagtatgatagcgacgaggattccgggtcagagggggacagtgaaagcgatgacagtgacgatgggctttctatctcggacgacgatgcagatgtggatccgcacggactttcaaaattacaagactttgtccagtccatggagaccgagaaacctacgaaacgtacccaaaaatcacaggaacagggcaagccctcggaatacggcttgacgaccgccaacaaattgactgtcgccgatctactgccctcaatcacagactctcgcctcaagaactcgctcaaacatatcgactctgttgtccaggcatcaaaatcgggcattccgggcaagctagatgctcctctagcgaaacgccaacaggaccgacttgaccgagctgctgcctatgagaagagcaaggagactttgaaccgatggctcgaaaccgtcaaagccaaccgcagagccgaacatctttctttcccgctacgtgatcctgatgctgagcagactcaccgcttagaagctgccaagccccagacagacctcgaaaacgtcatccagaacatccttgtggagagtgggctggctgaggctgaaggcaaatcagctgaggaccagattcagagtttcgaggaattacaggcccgcaatcttcctattgaggagatccaggctcggcgcgcagaactccgcaagcgacgtgacctgcttttccgagaggaagtacgcgccaagcgcatcaagaagatcaagagcaagtcttatcgccgtgttcaccggaaagagcgcgaaaagatagagcaacaagagcacaatgcactcttggaagccggcgtagatatggacgacatggaccaggagaagaacgagcgtatgagagccgaggctcgtatgggctccaagcatcgtgaaagcaaatgggccaagggtttgaaacagacgggtcgcactgcctgggacgaagaggcccgcaacagtgcagccgacttggcccaaagagaagaggagctacggaagagaatcgaaggtaagcgtgtttctaatggagacgatgactacttgggctcttcaagctccgagtcagaagatgaggacccttggaacgaggaggcttccgatgtggaaagacagaagatccaaaagaagctcaaggccctcgagggcagtgatgatgctggtgatggcatgaaggggcgccatgccgaccttttcgaaatgaaattcatgaaaaatgccgatgccgcccgcaaagaacagaatgatgcggagcttcgccaactcaatcgtgaactccgcggagaggagtctgcgtctgaggcagagtctgaggtcggtcgacgaaagttcggtcaatcaaagaagaccgaccccaaacctcgcgcaaagcagttgcccaagaatgagtttgaggagaagctagattcagatgatgaagctgcacaggccgcaggagcagacgacgatgttgacattgttatgaacggcaccaccaagcacaagtcaggagcttctggcaacaagaaggtttcacaatcctcacgacactctcccgatcggcaaaaggatacgccagtagaggaggagaacccttggctgattcagaccgaacggaccaaccgtcgccgaaccggcccagatgcccaagagagcattgacatttcacttgatgctacccagcccgaagttattccagtggagcaacagagcaagaagcaaaagaaaaccaaggcagccctcgcgaaacaacaattcgatgagaatgacagcgatgatgaggagaaggtgcccgtcttgcttaagaaccacgacctcgtgaagagagcttttgccggcgatgaagttgtccaggagttcgaacaagacaagatggacaccattaaagatgaaggtgaccaggtggtggacaatacacttctgggctggggcagctgggccggcgaaggcgtcagcaagagacaacaaaggaagcagaagcgagacctgactactgtggccggtgtgaagcctcagcagcgcaaggatgccaagcttgatcgggtcattatcaaccagaagcgagtccagaaggtaagccaagttgtcttcctatacgaagacggacaactcactgactttttactctagaacaagaagtacatggcaagccaattgccgcatgagttcgagaccaagcagcaatacgaacggtccctgcggctgcctttaggccccgaatggtctacgaaagaaaccttccagagtggcaccaagcctcgtgtcatgatcaagcagggcgtcatcaagcccatgtcaaagccgatgcaatgaatgtaaatatctcacttcacatatgccatgtccaatgttagcacctaatgcgacccatcttgcggcgccttttgaatcaaaagcatttctattcttgctgtactccattccacgtgcccaagtgcacattatagttatatagttcgaatggttcgtacttcatatcatttcacaacaatgtttccactaggcctagtgtcctgactcaggatagtaactattttatatctggacaatgtaggtggcatacgtgcctctctcgaccttgggattgtcaacttaagaccttggataaaccattagaacatgtcccatgattctataagaagtaactaaaaagccatccaaggattgtctggtgattcatattgagtcatccctgagttcttaacaatttgaatctgaatatattcatgctttttcttccttttcaatcctgtcgctctactccacatgggcgatcccttggcaagtgctgcctggagttgacatcttcaaatatttgactattcacgtctatctcccaggtatccccaattatctggtaacagtactatatacataatccagtaagtggatggtcgttgcagtgaatcccgcacacattcttgggggtggggaacgcacgcggactcgacgtgttgcctgttgcgccctacattgctgagccagacatgatacccaactcatgtcattccccttggctgaaatatgtactgtacagtactaacatctgtgaagatcgacagtctgtggaatctgtctgcagaccattcacaacaaaccagcccgtgtgttgtcccaatttgggtgtttgagctccgagggggtttgattctgttggaatttatagcacatacttgtaagattgcctctctttgaatttatttgtctccttttcaagcttcacttgccttttggacccctccgaaggcgtctaccctcaagtgattcatatccgatttggatcgaattgaggaatagcacaaaggcttcatacttcctacaggctccgcgtgtttaatgccggtgacgagatctggctttgcatcatggactcacgcttgaaatggaaggctacagccgtgctgacttggcttttagctacagaaaaagcctactgtctcccacacgtgggaaatgaggtagaagctactctgcaaaacacagctaccgaacctgcacgtgcctttgagactcagtatccaccttcaaacagtgaagacaggctgcttattcccgagtcccaccctgtacgtctcagagaaatgtgctgcatagtatatggtatggtattgacattttggactaggtgtatcgagtagctttggaacaggacggtcattcatcgcagcagccttttccacagtttgacattatccgatttgttgacggcttggaagatttgttgggctcaggtggtaatactcctgcaccaacactgactgcgacaggacagtctactggtacaggaaaatcgcatcctattcaagctacgacttcagcaaaacagcctgaaaacccagcgccaattcatacagctggatctgtgacctactcaccgcaggctgggccaagtactactgtggcacatggtatgattgaccatgaattatagcaacttcaaattctaatgcttagtagagcccgttcacatactttcttcatcctcggttacatcaaaaaccatgcctagccaagatatcttccagccggttgcgactggtcctgtccctgctaatatcaagtcccgagatgatcaccctgtgcagaaccagcacgtaagattatcccaaatgtgagcacgaatcaaacattctaatgttgtggtataggccaatactaccaaccctattgcgacgaataagttctacgcaggccttttcttgggctctcagaccaatgctaccttcactcaaccctactctctggcatggtccaagggaggtggctccctgaagagttggggtatggctgtctcccatgtccagcctcatatgcttgcatacggaccaccgaacagcaagatccccggaaacccagtacaatactacatcaacccaatcggccttcaatctctgatcttctctgcaaccgagcttaaccagtcttccatcatgaacgtcaatcagccaaaggctttctcggcccacgctgtgatcaagccctctgaaggctcggctaagcagattgtcttccccgttgtgcaaggcatgggctacgcaacagctgtgtacagtgatctgcagccggtgattgaaagtggcgttttcttccgtaaggtcgtcagcgctggttcgcctaggtccggcatcttcaagtaccaggtttacctcgaggatgacatgacctggcttctctatgccactccggctgatggcaaggatccggagttcaagctagtctcaaattcccgtcttcgcgggccccagggcttttctggtactattcaagttgccaagaaccccgcgggcaagtctggcgagaaattctatgataactcgtctggtgtatacccagtggcaggaaaaatctctggttctgtcacagatgatgtaggcacctacacgctctcttggaagaaggccggaaaggatgtcaccggcactcctctgatcatgttcgccctaccccatcacgtccaatccttcgatggtgccaccaagagccgtatcactgatatcaaccttcgcaccacaacaaagggcaactccactgcagtcattggagaaagctggactatggtcgaacaaagcctccccattgatattggattcgctccgtggtcaaccacccagggcagttctaacgagctctcagcctcagctcagcatgccattctccaggctgctccccaggagctcaagcagaacatttcaggccagacggaccttaacagcatgtactacagcggcaaggcgttgagcaagttcgcaacgctagtgtatactgtcaaccagcttggcaacagttctgatctagcaacagatgccttccaaaagctaaagaagtctttcgatctattcgtgcaaaacaagcagcaatacccgctcgcctacgattccgtctggaagggcgttgtctcgaccgccggctacaatggcgacctcaaccaggatttcggaaacaccgcatacaacgatcaccatttccactacggctacttcatccaagctgccgccatcattggctctcttgatcccagctggctagccgcgaacaaggagtgggtcaacatgcttgttcgtgatgctggtaactctgttccaaatgatccttacttcccattctcgcgctcgtttgattggtataacggtcactcatgggcgaagggtttgttcgagtctttcgatggcaaggatcaagaatctacctcggaagataccatgttcgcgtatgcgatcaagatgtgggggcagacgaccggcgatgctagcatggaagctcgtggcaatattatgctgagcatcctgggtcggtctctcaataattacttcctgatggaggatgacaatgtcaaccagcctgcgaacttcactgcgaacagggtaactggaattgtaagtaccaccattctctttccatgtctagcccaaactcgacattaacagaccaaaacaaacagctattcgagaataaggttgatcacaccacctatttcggtgccaacctcgaatacgtccaagggtatgtataccaccgtcccgctgttttttttcactccgaactattgctcacaagtattagtattcacatgctaccgctcatgccgcacagtcccttcacacgccgaaaggagtttgtgcgccaggagtggcaggcaatgttcgctgaaaacgcctctactccggcctccaaggttgagggcggatggaagggtgtgctctacgccaacctggccctcatcgatcccaaatcgtcgtgggacttctttgcccagtcgaatttcgactacagctggattgatggtggtgctacgcgtacttggtacctggcatttattgctggtgagtctcttgaatggagtatgatgtcttttcatactaacgaaacatattaggtctggggggtgctccttaaggtggtttaaggcttatttcttggtgatatggagttgggtaatgacttcttctctttatgcttattttttctggccttatgatttgcttttctctacttgcttcttgttttcggacggtccttactggtggctcggagttttcttcgattcttgtgctgtacttcgtatatatagaacgaataagaattatagaatatcatttctagctcgatattagcttgttcagttaatagacatctatgcgcctttatcttatttcttggtaaatatatatatccgtggatacaacctagtctcttatttctcccgttattaagattcctctacaaccataaagttatacttcacatagaacattttggcccttggtggtatacatgacctattatcggttcagtagtccatccatagttcccatcgccataccatgtccaggaaccgtcagaatatatcgcaaatatactaacacagtaaactacctgaatctatgccccagcaacagggagctctaaatccactacccaaggcgcattcctcgcctcatacgcgaccgtcataatactcccattaacaaaaagcgtctcctccccaacccgcagcggccgatccgccccagcactaacatcacagaacgctccgcgattctctaacatctcctccatatccgtcgccacatcttcaagtctaacaccaccatctccatctccacccgccttatcatcccacactccgcgctgtgcaccccacccttcatggatatgaccgaagagatgcagtcgtggccttgcgcgccgcgccgcgcggaggagatgctcacatccaacgctcaaatcaggagggacctgatccaggaccccggcgggcgggccgtgggttagtaggatgtcgatggccgggtaatccgggattggattttgaggctgtgggagtgcggcgggggcggggttgtagcggtcttggtcgcgagggtatgcgaaggcccagttgtagaattctggttggtagggggaagcgtaaagagtgaattttgcgcctgttgatagggtgaaggagtggattccttcttcgaggtagattattcctgcgtttcgggcagattcgcttgtccagagggcttttatagagcgggcgtaggttttgagagaatccgtgtttggggttttggctgaggaagtgcgtagggtggtttggaggttgtcgtctgatagcaggatggattcttcgcctagttgctccgggcgttgatggcgggtgtagccgaaggttgtgaagtattcttcgtccagagttatatcgtggttgcctgctattacgagcttgagctcggcgtcggcgtcgatgagcatggcgatcattgcttcgtgctcgacgcggtaccccacctttgtgaggtcgccggcgtggaggaggatgtttgctttcgggagtggatagcggtaggcataatcggttctttgaggtgggtgtggtgtgcttgtatgagtgtctgatatcatacagatgcgagtcttgatggtcgccatgttggttgattgagggaaggttgggctgtgggggagatatggataagcatcaagctcgggccctagtagcgcccagagcctccaagtacccggctgtccaacacccctactgggaactgctcattgataagttctataaaagatacattggaacatgctcttctgcataagtctttctacgaattgtattacttgtatactacgcaattaagaatgcaataatcacctaaagaagagatgaaactaggaaataattcccatggatttgacggctcagagctctacagacaaattgcatcctgtggatgctctgatcatgacatagctgaaactccgatccacccgttgcaacaaccgaatattttattttttcgtttacttgcggatagccttctggtagaaagcaagctcctcaccctccaaaatgtaaccgtcgcagcggccggactggccggggcgcgaggcaacaacggcgaacagacgaccggactcgaactggcgctcgatagcagactcggtcttaccggagtcagcgaagcgggcagcctgcttcttggcgacggaggcggacttcttctcctcctcagtagcatcagccttctgctggcgtctacggccgatgggctggccgtagtgggcctcgtaccactgacggaagggggcagcgtcaatctggacaacggccgacttggtcagggtgtttgtgcggaccagctcgttgttggaggggtggaaggacactccaatgatacgggtcttgcgggagacaccctcggagccccacgagaagttaccagactcgagacggagaccacggaacttctggttgccaccacgggtgcggacaaggtggatgcgcttggtgccaatacgggtgttggcgggctgacgacccttctcgaaagctctgtaggacaaagataggtaagaatctgcaagtggtatatcgaatccttcccctctcctttcaaatgaaagaaacgttcgacatcatgctggattgattgaatcgtacctcttcttgcggtagaaagcgcgcttggcaccggtggcgctgcgcttgtggcgagaatcccgagaaatacccatgtttgcgattgatggaggggtctaagtcgacagacacaagttagatattgttgattgtggaccttcaacaagttttctttttttctttctttcaatccttctgtttcgtcgcgagcgccgtgcaagatcaatcttcgaatatggaacagttgggcgacagtgacggtggagtggttggatgaccgttgaaagcgagacagaatcgaaagttgatgttgagggaattgaataccgatgatcgaaattgatgggcgcagcgagcgaaacagaatttgtcgaaagaaaacttgcaggagttgagatagcccggtaactcacctctaaatgtgcagcccttcaccagaaacacagattagttgtcgtagggttgtcgtgggagtttgaggtcgtggagtcgctgaatttcgcagggcgcactgtgtcgctcgcttgtgtagtgccctaaccgacactaggccgcatttggattagtggccccagtcactggatcggtcaggtgataaccagatggctagtggctgactcatcgtaaagtcacgtgctggtcactacattatcatgatctggtcgtacacgatctggacattcgagccatttacattacaacgatgtacaacattgaaccccaattgcgtctatttgcagttatactcacaactctgaaatcaatacaaatacaaatgatcggctttcccagctagtaattgcacctatcaccattgactacctatgctaccctctactggctcttgccgttcttcttcgccttctgctccttcacaaacttcttaatgcgcgagaacgaaccgtaaccctcaacaaaacacgacgcaacccacttccaccacaaacccgacataacaggcacattcaggggctttagttgagtcacaactagcaacacggtctcaatgatatgaatagccacgacatacggctggagaatgcagacgaggcgcggaaaccagggcacacgctggagacccaaatactcgtagaattccgagccaggctgcagattgctgcgttgaaagcaggtgatgtagaacagaaaacacagcacaaagatcacagcctggatgccgcgcggggcacggtactcagtgagtgtgatctcgctgcggcccagacgctttaggctctccttgtgcatagcaaccattcggccgcgtgcctccgagtagtccttcattgccggttcgatggggacgctgtagcgggtaccgtgagcggtgatgatcaggtaggaggtgctgatttcttctaattgggcgtttttggcttgggcggatgtgataccgcagtaggcttgtaggaatagtacgagggaatcttggtggtcggcgttcatgtgcttgatgatgaagtctttggatgacatggcggcggttgtagtgggagtgtaaagtgccaattgggctggattcgaaagaattgaaacagttgcgatttgaaccgagtaccacgtatgatatatggggagttggtaacacaacgggttagtagaaataagtgccaaggcccgggcctcggcttcacagtttccgctatgcctgacactttacagaagtttacactcaccacacgcctactacaacactgctgcacttttaagaaagatgaattcaactccattcaaatgattgtccaacaaatatacatagcagtatacgctccggtatattgcatccccttggccctgcacgccaggaaaatcattgtaaaaaagaaaagaacaagatcctgaacagacaaacggaaaggtattacatcaaaacatggctctatggaaagcagcatccaatcaattgaagcattgaaaaaggatcactcgtgacgacgttggatcttcgtgataggattggcaatggaacggggatgggtggtcaagccctgttgttgatataaaacgcgatcaactcctaattcggtccttgagcagacattctttgaaggggtttggggagaggaatgcaagcctcggttattacttacatgagagctaaagtaagatctccatgaatgcgtgccttcagctcgacctcgatttccagattcagttctaatctcagcttcatgccttcctcgtccagcattgatttctcctccttatgaaggacgtccatgccaccagagggcttgaagtccgagttctcattcgagtacggctgcatggcttcctcgtcgtcggattcgtactcgtctgaatcatattcagattcgtccgtgtattcgtcatcttgttgaacgggttgttttttcttctgcagctgtttgttcttctgtgtcttggtttgtggtacttcttcatcatattcctcgtcggtgtagtcgtcggcgctgtcatagtcttcgccgtcggagaggtcctcttggacggggaacttcttgggctgctctttggttttttcaagggtagccataatggatgtgatgggactagagtatagaggatagaggtaggaagaagacggtgtcaaaaaggaaataaaaaaagataaaagcagaagagtatcttaataacattgtctatatgatgtatcattcaagacggggaaacggcgcacagacatcatatcaaagtgcggaacatgacgttggaggctttgctttccaacttctctccaacttctctccaactcgccaaatccccagcctgcactggcttctcgctaggcctgaccgtggtaaaggccgtgtccatactgaaaactgcaggataaatctccagaatctgccaagttgccaacaaaatgtgcgtatcctcgtgtccgatccgtggaaacaacgacagactcgtggcgtgaaccaatggaaaagaaaagcaactaggaacaagtaaatcacttgtcatcgggcggtttgattggctggctccatcctggcaatctataactggcaatttgccgtgaaggctttgacgtcgagtggcgtcatatcattttgcgttacgtctgtttaatctattagtgtggggaacatcaatgcaccaacttcagcgcgatctaggctgattggcgcatgaaactcgctgaccactatatttatccgatgcacactttatatacccagttgctccatatgcgctccacatcgtgatccttgtcccggaacgtcatctatgcagtacctggggagtcccagcccgatgtctggcaccgatggacccaggaaccacggcattgttcccagctgacgtcggaggcggttaggttctgtttacgtccggttttatccaagccctgtgactctgatgatataaacggctgtgaaatctacatcattgaactagacgcacgattacatagttcatttattaacgctttgtccttcattatttcgtgctcgaatcgattcatattcccctcattccccctcctgacagccttcttcttcttcttttattttcactatgtccgaccaggaacaacctcccactcctaatcccgactcaacaaacacaacccccaacaagcccaaacgtgcccctcccaagctaggcaagaagtctcctgccaagcaagaacaaacccctccatcctcggaacaggaccaggaccaggatcaggaccaggacaagcaacctaaagaagacgagcctaagcctgaagagcctgccaaacaacaagacccagagtccgagcctgagcccgagcccgagcaagaagaccagcccgaaccagaaccagaaccccaacccaagcctgaacgtcgtcgtcgcagacctcgtccccgcccacaagaatcagacaccgagtccatcgcccgcagcgaaatggaaccagagcccagacctcagcgccgtgtccgtcgccagcgccagccacaacaacaacaacaaaatgacagtccgctcggcgggcttcctggcgttggcggcgtagaccaggccggccagctcgtgcaaaacacagccggtaatgccctaaacggggtgactggcagtgcaggcaaagctgttggcggggtccttggcggcggcgaggagaagaaagacgatgatggcggtcgtgatgagcagcttcgtctgcggttagacctcaatctggatattgaggttcagctcaaggcgaagattcatggtgatttgacgattggtttgctgttagtattccctcttttttcttcttatgcacatctaaccctcccatttccccgtggctcttaacttgactccatacttctgttggtgcatttcactgactgacaatctagtaattaatcttgccgcttcacagcaagtagagaagagtacatacctcttctaaatatgcttatcctttctcatctcgatgagcattcgggccccgttccacggaggtatcgggtgtgcctacggatacattcaatgacttgtttatggtttatgttacagtgatgcacgatgcatgggttgattttcttttctttcttgttgatatttcttgtctgcagataggccatcctcctggatctggcaactatcctggtgtcttgcggtgtacaatacatttaaccttcagtcttggaaaatatctgagtcaggagaattggaataatgaactaggcttttgtgttaatatcttctaatccgatgctgtatagattgaaacaagttgcctagtaaagagaactttcggcttgcactgattgaatctcggacgggatgcagtgttcataactttttaaaaagcaggtcagtcatacttggttgaagccattagaataaaaaatatatgtgtattagaacactacactctagacaactcatctagctatctattatcatttgtgcaaagaatctactcccaacagaaaaccgggcgaagtaaaagaaattaaatacaaaaagaatcaaaacaccgacagatagagaaaagagtaggtagtataaccaaatcatatatgctctcttctcatcctttataccaagtgtatttgaacccatctaaccaaagaaaaaaaaactgtagctctttcaaagagccacgagaccattccatcctactatagcctacaaacccgcaacatacatcagtccgtatccaattgtgacaataaccacaaagcacatgagactggccgggatgccgcgggtcaggaaatggtggacttggagatatcgctggccggtctgaggtacttcagtcatgatagcagctaggagaaacaagttagcaagagagctcgatacaagtgaactgaaggaaggacatactcatattagggaatccactcgtgggcaatgccatcgcaacagagcacatcaaggcactagccatgaccaacaagttggggtgaggattttccatgctaacgccgatctggcggacaagcggtaggatgataagggcggcgacggtatgcgagatgaaggtggccatgacaaggatgagagaacagaagactaagaggacgctgtataggctgaggttctcgacacgcgcggtgatacccatggcgatggtgtgcagcaagcccgatgaagtgacggccttgcccagacacagaccaccggcggcgaggattatgatcgtccagaggaagttgttgaagtcctctttgttgaggatgccggtgccgaagaagatgacgagagggatgatggcgatgacgcccatgtcgccgaaaatgtgctcgagctggtggctggcgcaccagaggacgatcgtcaggagcgtgacgatgctgataaaggactgcatgccggtccagcggtctttgacagggcggatgggcatcacggttgagttgcggcccgggcggaatgtcaccagcagcagaacccagatgagtagaatggagatgatgcagacgggcaatgcgatgaagaaccatgtgccccagctgatgttcggctgcatgttctgcagggcaatgatattctgcggcgaggcaatcggggacgctgcaccaccgacattggcggctaacgcgatacccagcacgagtgccttggcgaagtccgactcgggaggcatgttgcgcagcaaaggctggatgatagagtagcagagcacaggggacgcaacattgctgatccacatactcaagaacatactcacaaacatgttggtcaataacatcacagatggcttcgatccagctttgcttagcacaaacatggccatgcgccgtgcgatgtcgtacttggacagcgccgctgcgattgagaaaccacccaggagtagcataatcacaggagtccacatcgccgcgaacaccttgccgactgattccttgggtcccagccgcgtgtgcggctcttcgtctgaccgcatgatgcctagagtcacgactaggaatgggataagaagcgaagtgacaaacagcggaatggcctatcactcaacgttagcattcaatgtgagtcaataaacaaacagtaacccatacctcagtggcccacaagatactaacgaggactagcatagccaagcagttctgctcctcgggagtttccatcacgttcaaggaaagcattacgccgaatatggcgatactaaatatcagcgtaccaaagctcaagctacagagccataacggaaactggaatcgaccaagcggggttgacatctcctgggtgcggatctcgttcttgtcgccctggcgccgggagctagccgggtcatcgccgcccaggagggtccggcgaataccaacattggcggcctgcgcacgtcgttcgatttcgatcatctcgcgccagacagtgttccgctcccaaacgacatgctcacgcagatgcagacgcagctcgcgcctagcagactgtttatcgttcttcgtgacgatgcccgcgtacacaccctccacgttctcaatatggcgatcgatttcagccatggtactttcagtgaaaggtggtgcgggatggacaacagtggctaggtagtctcggcgcaggctgcggtccaaggttttgtcatacttcttcagggccttggcgaagccagtcttgttcagctcgatgaaggagcgaagttcgcagagtgagacgtagcattcgatcaggcgcttttttaacgatataccggtattataaagagcgcggaaatcctcgtcgttcaagtacgactcgtgcggttctcggctggtcgccggtccaaagtaggaagagtctaccaaatcaccgtagtggtcctccgtgccagactcgccatcgatcgactgcgacactctcgggcgatgtgagacggccgccggggaacgatcgtcgtcgctatcaccaccttctccttcatcgtccgccatcgagtcattgctcacagcactagaccgccggcgcggagccgagacattgttgccgcggcgggagcttgcctttatgattgtctcgctgacggggtccatattaacaccgtccgtttcggaaagatatacaccagcgtcttttatgagctcatctgcgagttcaaaaatctccgcctccttcttctgatagaaggaacagatcttatccatctcaacgtcaagagcccttttaaagattgcatccgggttgctcggctcagcgcccagcagcggagcggactctacatctgtggtagacggtccctcaacgcgattgacctgtttctcgagggtgtagatcctagtcacgatgcaacgttagcaccatcgaaataatcatccgggccggtgcatcgatcctgtgcaatgtgacaccaattcagattcccgaatctgcatgtacacactatcccagccacagacgccctgatattcaacccaacaacttacaatttcttcaaattgctgtacgcgatgtagttcgagctccaatcgggcacagcattaaactgaatactatgcgagaacttcatcttggcttttgaatcaggatcgacgttcccgtgcgatgcgttgtgagcgcgacgtcggagagcctcagcccagaaccgaagatgaaagccctgaggctggtcgtgctctaatgtcttctcctgcgattcctcaaggatatcaaaatctgtaagggggtttgagttggcggcaaggtctaaccgcccaacgctatctcgatattggtctgagcgagcggggccagatgcggttgtggtagctgtgtgggagggagggaggtagtcgacaagttcaatggaatcggagtgcgaggtaggagccaccttcaagagagaggccggagggtagtcggcctaggtcattcaaggagtatagagagatgcaggactgaggggaaggtagcagtggcctctatcttgggtgggggcacgaagaggctcgagaagtccgggtcagttggatattggggttgcactaagtaaggcaatgatatagcgcagcactccactgatcggggaaagatcttgtatctggttggaatctattccgaggctgtagacatgtagaatattgaacatattggcggttttttttttctcaccccaggaaccgttgcgcttgagctatgttgtagattaggtaagcgtgctgcttggcagggcctatcagacaatgctctatacaaagcactgagagaggtgtgacagagaacaagatgaggttgatgtatagaagtaattgtattcaaggtgtgtaactaagtttagctgagggtaggtggtctccaataataggaaccgtaacgataaggagtataagccgccatgtctatgtatataagacaacgatatggagatatcataagcgaatctaaaactccgtagcatatgtcaaattccaacggttgatattggcttttcctcgggaaatatcatgagcccatgaagaataaaagtcaaattcttttgaccagactatataaatgtacatatgcagaagtgctcagagatacaagacaaacccccaaacccggatagaagaaatacaatccaataagaccaatttagcgacgagcgttagtattcaggttcgcacgaccagaaataccaatcttgtgctgttggtccctcttctcccagacaccgctacgaccctcagcaacggccaccacctcagccgcaacacggttcgcaaacagcgcatcacgtcgcttatccgacgcatcaagaatccacttgatcgcagtacggcggcgctggcgcagagtcagcgggtgaggaatctgcacggcagtaccaccacccgcgatacccttctgctgacggattcggaagaggggcgccacggagtcgacgacgagagtaaggtagaggacagggtcgagggggagctgagatgccgggggagccccgaggagacggcgacgggggttgatctgggggggagaggcggtgcggaggtgatccagaacgagagacatgttctaatatccagttagttgattttctcaacacaccctcgccaaccatagatgagaaaagagaaccataccttctgcgccttcgtcagtttcccactctccatcatcatcttagtgaactggtcctgcatggtatcgtagcgcttgcggaagttcaacgtcttcaattcctctgggagggcaggcggatcgaacttgagcccagggttttcctcaagagcctgaccctgcacctgctcaatcatgctggcaagagcagcagtggcctcatcactagcgccatcgagtccgggaatatgaggaataaggttagcctcgttgttaggctcaacaccctgcagatcgttcataaggcttcgagccgaagtcgagaacgagcgcgagccaccggactttttcaatgcgtcccgcataacctgcggcatgtgtttcatagcgtccttatcgcggctgaggacctgttccacgaaacacagttaacacgggcctttcggctttctcataagaccctagcaagctctcatattatgtattattgctcacctcctcaacgggcgtcccttgatccaactcgggagtagaaggaataccatcacaacgcttttccttatccataattcgggagatctcgttggcctcctcgctaacatcgggcagctggtcgacagtcgggtaagtctgctgatcgggctgtggctcgaccttctttgagccatcgcgcgaagagctccatcggcactgaatgggtagtgactgaacggcgcggaatcggacggggctggcgatgagtgcgggcgtggtggattggcgcagggccgagacggccttgttggctgtgaagaggttgagtcgaggcggcatggtttcggtcgtgagaattggccccggtgtaattattgagacgagggggtcaagattaatcggcctgttttgggaggtttgcggcgagcaaatttccggatttgcttagtaagcgccaagattttgatgtgaggtcatgaaatgtacaacaatacttgatggaaataagaacaaaagtgatggatactaattagtttaagcgatgattcaaggcaaaactaagcttcgattcgtcgattctagtctagcactaaagagaagactttttctgatgatccaagtgactatctagcgcagatatattttcgcaaagtgatgtcgatatacatctagtggttcaattttaatgttgtgtttgacctattttgagttactctctacatagacttatagagatatagtgggacatgcaattttgactactaaggtactatagacaggtactatagagaagtagttttgacaaagaatacaaagaaaacacggtagatgctatatgtagcgcatgaagaatcaactaaacaaaagagggacctggtcagagatgacaacctccacaactcgaagataaagccccaaactcaagccatagctcagttggtaacatcatcagggtagacatagaatgccaaggccagaatgatatacatgccgagacacatgccaccctcaaggtaattggactttccatcctgaataagcaagttaacaaccaatccagaaatgaagaaagccacggtctcgaaagtctggaagtgcagtgtcatctcgatatccatgatccagcccaggataaccaagaagggcgtgacaaagagcgcaatctgcaagctgctaccaatagcaactccgatcgcaagatccatcttatccttccacgcaaccacaacggcagtgacatgttccgcggcgttacccacaatcgggatcagcaccagtccaatgaacgtcttgctcatgcctgtggtctttactagggggtcgatagcatcgactaggtaatcggcgcaaatagagacgaggagagtcacaatgacgagcaccacacccgcagcccacgggctgagaatgcgctcctcctcctcgtgctcctcctcctcggcgccggcgatgttctcggtatcgctaccattcgtctcttcgaagaggtcggagtgagagcccagctggaagtagagatacatgacgtagatgatcaggaggatgatggaggtgccgtgcgataagataaggatgttcttctgcgcagcgttgtccgggtccgagttctcacctgcaccgtcgggattggcgatggagttacccgagatcgcggcgtagagggttgcgggaatgataagggatgcggacgccacagccatgagcgaggacatggtcgatgctacggtggtgttgaaagactgttcgcggtagcggagtccaccgacgaagaagcagcagcccagcacgagcaggatgttagacaggatacttcccagcatactggcctggacgacgcgaatctggttctgtctcaaggcaattacactgacctatcaagaaacaaagataaattagcatcaccacccgctagcaccggtatcaatttcaagactcgaggatcggcaagcttacaatcagctcaacagcatttccaaaagtggcattcatcaagccgccaagcgcttgacccagagtagcggccagctcctcggtagcgaagctgagtagcgaagcgaggggaacaatagcaaagaaattgagtgtaaagacagcggtggagtcccagccaagggcaccggcgatgatgcccaagggcacaaagataagcaggacgttgacatagtcgcggacgattgttttccacgtcaggtggacgacgcgcattggccattgcacccatatacggttgtcgttcgggtggtggtggtgcagtccatggtcggtatgctcgtgagatgagaggccggagaaggagccacggtgtgcgccgaggagtcccgttcgctcactggcgtccagggagccgttggtgccagaggccattcttcgtggaccgaaagtgtggcttcgaaagtgagagcggaagtttgggagagctgaatataaaattcctcgggttagtttggtgaattttgcatccgttgccagaacggaattgtataatttatgagactttcacagaaagccggaaaggagcggatggggaagaatgagaagatgggaaggggaaagggagtatatcaacccacacatgatttctacttggtaccaagcttccaaagagattaaggaatggttaattggttaatcggtgggggttcaagccgcttccaaggtttttctttcttagcgacaccgacatgaaatttccgaggaatcaaagttagcacagcctttcgactgttaggaacttgaagaacaaaaagtggggccctgagtgtttgccaaggtgggtgtggcccagtcagtggggagcggagctttgaaatgacgacccatcggccttggagctccacataccagagaatgggacgcgatgattggccacagtgcaatgccaaggttgtgcactgccacagtccacgattgggacgcacggaccgatgtgtttcggagatccatggatgctgacttggacttaatctaagtcaggggaaaaataacattatgtagattggaactatatagcacatggtatatctcttttaacaccaaaaggagaaccccagtccatatgacagaaaaaaaaaggatcaaagaagaatacaacagggtagtaagtcacatcgaagtgaaagaaaaagaaaataaaaggagcgtcaagacactggagaaaagaaaaagtcaaaaagaggtataaaggatagaatcgaataggaaaaagaaaggtgatcatcattactcctccggcagcacaccattagctttgaaatccatccgactgctcttgcggccgacacccttgagcatactgaaacgacgaaacaccgagtcccgcatcccgctattactattattgagcacaggggacaacggcgccgtgccattcgtggtcgtcagagtcatcacattactatcacgtgtggcaggccgcgaataatcgcgtgtagacgggagcgtcgaccacccaccactggaggcgggcgcaatccggtctgtggctgcaccggtggcaacagggccgcgctgctgggagtcggcgcgactgcggccgtcgtgggagcgggcagccgtgtcgtgggggacattgtgcgtgttcaatgaggtctgggattcatgggccacggacggcgaggagccgtgcttgtaggtcttgtcgccgaagaagctgcggcgtctctcgcttcggccgccgcgggagtggctggttgtgcggctgttaatcgtagccgtgtcgtcgtcgagattttcgtcttcttcacccactatttggcctttgctgtcggattgctggatggtgaagatggagttggtggcgccgtgggatcgcttgaaggggttgattatgctgatccgttgactgacggattgcctgtcggagcgcttgcgcgtgtgggcattgtttcgggctgcgcggttgaggtcttgttctgaactgccgactcgctggataggtggcattcgacgattgtcgctcgaggagggggactggcgagctgtttgtgtaggcgtaggtgatgaatactcctgcggagcagggacgagagaacctaactcgggctcgaagacatcttcaaagcgtcggagtagttcggcttgggtagcttgctgagcggggcgctggtaaagagccaatgcttgtttgatagccaaggcgtggtcgacgagtgcaacgaagagcgccgtctccattgggtccaccggctgctgtgttgcttgtactatttcaccgtcttcatcaagttcctcaagcagcttgttccttgccatctccgcatcggataggaatacccgatacgatgccacacagttagaggttgacgagctgtggtcaagcagtgattctagggcatcggtcagattagatagaccagaatcctcacccgacgcagcacggcgtccaataagctgaagctcctgtgttttgcgccacgtgcgctcaatagcagtctgcagaggcgagagcgtaacctcttcggcagaaatgacctcactacgacggaggatattcggaaatgcttccgagacagtgaagacgagcttttgaacgaagtgctcccggacatccgagctggtcgtgtgtcgtcgcgaagtggaagagaagcgagatggatccgagatcaacaggtgctcgcggacagaagacggaaccttggggcgctggtagacaggatgagacacatcgcggtatgcgctaacggcgctgatctgaaggaactggccctcatagtcaggtatctcgccagtagacatgacctgcgcagtagggtgttcccgctgcatacgatccacaaaagaggccatgcgttcagtcggacacgcttcgaatatgaactccttatcgcgtaggccgggaggaaacccaagacccttgtagaccacacggaagtaacgcgggaattgtttgttgcccttggcgatgtagtcataaattcgagccatggagctttgggctcgggagagcttggcgaagtccattgtcgtgtgctcatagtgcaccgcgagctccttatagcaagctaacgcggggccccaggccatggcattttcgaagttctggataatggagaagtataaagcctctctccgttcgaatgcattctgggctgggaatgcgggcctgagtagctccggcataggcttgatgggatcccattcgtagagatcggcatggaactgaagggcaagacctgcttcagtgaagttacctgccgcagcctgagcatccgcaagttcatgaacgtaacgaataaagatgtcctcgcgacccatgtccttcatatattccattaatttcagagcgtgcaaactttgggttgaggcaccgctctgagaagccaccaaaagatccaagagctcatcgactgtcccgaccagactcttgacagcattcgacaacagatcatcggatatagtttccctctcgaacagatccaacagctcgccgatgaaaaccttctggctgacgctctcgttcatctgcttggacttgaagagcgtatccaggctagagatgatctccgtttcaataatggagatatcttggttcagatcccattcactcagaatcatcgtctgcagtatttgaacagcaacatgtcgcagcccctcgtggacactgagacacagaccaatgatgggaggcaccaggccgggaacatactggacctgataaccgcccagccttttcagattgaatcgctccctctcgtcgtccgtagtctcccaaccaatggcttcccaggtagattgcaataagtccgcaccttgctcgcgcacatcgccggcgatcttccagacagcgcggcgcttctgctcggggaaagtttcgagcgcaaggacatcactagagatcacctttaacagagtcgtgaaaaacgactcccacagcttggtatcgaatgtgtcggcatcatccggtgccggaaggagtttatcaattagcaacactgcaatatgttcaagactcttgatagtcgcgcgatggttgtacacatgaatactgaaccaggtctcgggataagcctcgcagtcgaggatggagttgtgagcctcaagggtctgagcaacaaatagtgcaagctccaattctttcaagttgggtagcttgggagacgcgatcttggcaatggcagccatgagcgcagacagttccaccaaagactcatcgaagctttgaggggtcttggcagtcttcatctggaaggggaacgccttgctgaaaagcaaagaaagatactccgactcctctactccctcagtggagatagcacagtaagaggcgacgatagctggcatgaatccataaagcagaggatcaggctgactgagcaattgagccacgattgagttgctcagtcgcacctgatctcgatacaaatccgagacgcctgaggtggaaccccagtatggagtcaaccagccaatacagctggagatcaatgttcgtctctcgtcgccggaggcgaaaacatcaaacagagtataattctgaatgagaactagcttatagagtatcaacatgccggtgacatccttgcatgaatccatgaaactcagagcgatcataattatttcatccttgctcaggacgttggagagctcaggtagccacgtatggaaatgttgaactaccagtgttttgctgcccaccaaagccggcgacgagtttctcatcaaagtctccatagccttgaaaatggtacgcatgtctctgttgaaggtggattgcaccgtggtgatgccaataccttcctccttggccttttgctgctcgcgagccttgatgatgaattttaacagatggcgtcccaccttgaaggcggcacggagattgcgagattgcgtaccgtcggtccctgcgtttaagaggcgcaagtagcttcgaataaggcacggggtgacgaatgggaagttgaactgctcatcggcgtaccggtcgaccagcgggcctaggttgtatcgtcgatcatggacaattcccagaacagtgaccaggttgttgaagatcaagttctcgtattcttcattaccagcattctccaccaggattccgaacagcgcgtcgaagacaccacttagttgtttcacaatctcgatttcgggaacaaaaagtaaacgtttcagggtatccaagacctcgtccacgggccgctctcgccagttgagaagactcagaatgacttgatcctgggagtactctgtgctgcaaagatgggtttcaaggtgcaaagtggccaatggacccgtcacagcttcatctttggcggattcattcttgccgagcgcgctccatgggaggttcagataagcaccctttccattctcaatgctggatgtctgcttgtcataagcatgcaacagcagagaatgatgcccatctctaatgaaagcttgctgatcccaaaggggcatccaggcaagagcaaagggaaattctggcgcatctgcaacactcatcactatgtgcgagccagggatttgttctgtggggatcttgaggcggatggtctggttccaaggtgtgccgcgctgggcgatggtagtgcgccatgccgtgtttgaagttttggatgacgaagggaagacacatttgtctatccgagctcctttagaatcacgtacttcaagagtgagttgaagattgtgaagtccgctggccgcctgcagaggaatttgacctgcttgcgggtgagacaggagagcatctgtggggaataccgcctgacagagtgtaacgtagatatcggatcttggcttcgtaggagccttggagaatccaatgcgctgtgtctgtatgacatcgtgcaatatagtaggattctgacgaatcaggaattccgcatcgcaactggcaaaggggcgcagatggaggtgtaaacgtgctgcggggtcggcacgtacataccggccggtgggactaggaagcaaggcgcggatcaacttgtcaaagccatccgtcagcccctcgccgtcttcgccgtctcgacggggcgaccaaatgttgatcacttgttcagtgtccttatcctgtcgaagaatcggcgatatctccaagatcccaacgccaacagtacggatcgccgagacctcctttgttggtgcgggttgaggggtggttgtgtctttgacgctggacgcactgctcgatgttcgtggaattccttgagtaatgggcctaggtggctgatccaagctcggtccgcgttgcttgggtgtccacatcatgctgcgtcgcgttttcaaactacccttggccgaaggttgaacactaccatttgtcgtggccttggttggggttggggtgtctcgcgagattgatggcctcgacacaggagtggtatcagctgtggaccgggtctctggggcacgaacccaagcaactagataaagctgccgcccattcggagatccatctccgatgtctgttgcggccaattcggtgaacagtgtcttcagtctactgctttggctcatgttgacgaatttatcaggagacggaatatctaagctataggtctcagataatggactgagtgaaccagcgtctgaccgggagaacagctgtattccgatagtcacttgccccggtgcattccctgataccgcgttgatctccagcagcaaatgatggagtgcagtagcatcggatgtctgggtgggactggattcgagcatactcatctcggactgcagcttcgccaattggatagcagagtcatcacccgttagcaaacggcctctctgctccggatcgcgaacaatcacgtccccgctaagcattttgtttgccttgacaagtttccagactgtgtcgttccgcaatgcttccttctcctttccagtcagaacattgtgtagtaattgtcgtctcgcaaagtccagctcttgtaccacggttgacatttcctccaatacatcataccggcgtgccaaaagtaattcatgcaaattagtcgaatgccattcgcgcagacacgatgcgatttcatccactaggggctctgtgagagaggtcggagtttcatcgccgatcttaagcatcgggacgggggcaggcggcttcggcgcatcagggtcgcgaggagcaaatgagacaggcgtatgcgggatcgagcctgttcgccatcgcggacttgcctggtctgacccatcggtcttgtgaatgataatctgggaaggcttcccctttttcgcaaggacgacgtccgacacctcggcaacagcctgaaagtcactgacggaataagccagactatttcgggacaggaattctccatcccagccggacaaggtcagtcgatcaatgcttttccggtcagcatttagtagtgctttatatccatcgccgtcgcctagcacctctctaatctcaacgcagttccgcgggaagatacccgagaatacacgagcttcgagagtttggcctttgatgcttgtcaagccggccagtaacgacggcggcgcgactagatagcctcgacaccattcgccgtccgtccctccttgctcaattatgtaaagctcatcgccaagctccaatggtagatctgcgggggaggacgggttgaaagggtatatggcaacggcaaatgcgatgcgaggcagcggccgccagggcatggctgtgttgtgaatcgctcgacgcgattggagctcgagatacccgatttgaggtgtgccagtccccgcaaatgggtctccgatcgcaagcctcgcgggaagagatttcgggtatgtggatcagttcgaggaatgttcgattcggtcaatcgaaggcaacatgtagtgggaggagatcttagtcgtcgagtcccgaaggggggttgaataacgagaggaatgcgggaattcgaggaatgcgacaagtaacgatctaaagaggcatgattagggaggtacaagcgggaccaaaggaattgtcgccctgtcggaaagcgaggaaagagagcacagagactgtagttctctcatcaaaagacacgaacgggagttctggagtgttgcaattcagagtatctgtgccccccttgggcgacatttcggtggagaccactatttagaggcgtggggaaaagactcaccgtatagaaaaaaaaaacacacacacagggtaagtcggagggaaaagagaagagagatgtcagatagattgaaaggaggaagaagattaaaatcgcagatcgaagatcacccccacactatctcttagccagaagctgggactttgggggataactgctttcgccttgcttcatctgttagctacatgatcacaaggatactttaagattacatctcctaacatactattaatatgcttgtaaaacaataattgacaagtctcctgaacacaattcattcattattcacccgaaacagtccacatttaccatataaatgtgacaaggtcctataagatagcaacacgtacctacatagtacttcacctatgataccaaatgaagccccgaacggtgggtcaacatggccaatgagaagatataatatcttacataggaaaaagcaaaaaacaaaacatatgaatcagtttcaagagtaacatctcatttttcattatatttccagggtctcgtctctagtagttggtccgcgggtgtttgagaccttaatagttctatggtatggttggctaagtacataatgtatgcttcaattagaatcctcaagctctagatatcgtgcataagagtcatgccttaccttcacgtccaatacacgaatagtcaaaagcttaagtcgatccgggtcttctaagagcttcaagaagtacttcatctggaggctagtatttcagaattgttagtatcaaggagttcattatagtcatccaagataaaaaagacgaagtctcgacgcaggacacacaaactattacagcagcaatagctactatatatccacgacaatgagactgctgatgaacttaaaaggaaacttgaggatatcgacccagcctttagtcagaatggtggacgggattgttacagggactcccctgcctgattaaacccaggtggaaatgaatatccaattagctcaaaggaatccgagtttaagtgacatgggtgctgttctatttggtattgtctgtagtttggatcttcgcttcttgagcaattcacctcaattctcacgtctcactgtgcacctcgatatttgcctatttaggccctacgcttctcattgcactaaatcattgcgtggtcggtgtagactttcccgaagatggaatctgaatattacaaagttggaatcggaatgagacagaaaaaaagcaaaaacaaaacaaacgggaatagatttaactctcgatacaaagtacatcttatttccggaacatgctaagggtctcttccttgcgccagtccagatccacttgaccctcgtagacatcttcaatgatctgccgaatgcggtcataagtgttctcataacggttctcgcactcccggagcaccttgacaactaggctgcgactaagaccagggtcatcagcatcaccaaagtgtttctccacacgcttcttgagcatctcgatgccacggcgggtttccttgttgtcgtagtaggtgagaaccttcttcgccaccatgcgggagtggctggcgcgggctgcgatgtcagtcggcttagcgcccgccgcgaggaggttgtcaattgactgcacgaaatcaaccaacttgcccagtgggcgatgaatgaccgcgtcgaggtagagcctcaggtgctcttggaagtcttggtgagcacgatcggtccagcgttcaagtgcggggatgttgtgcacatctacttcctcgatgtagtggttcatgttctcaatgaggagaatgtggtagttcaggatctccttgtcttccggatcacccgcaccacccgcagtgacacccggaggttgaccgggtgcttccttggcaatgaacttcagtgactcccacatcgcacggttgatgcggtcgtacgcgtcgttgacgctaacgcgaatgtcacagaaagcgccggacgggaatgacagcatgctttccaccgcattggagaagttagggaacacccgcatgaaggaaattactcccttccgcttgttcaccttgactttggtgtcctcaatgcctcggatttgctcatctacaaatcggttgaacagtcccatcaggcgggaatggattttctgtagtgcatgaagaatgaactcttgattcgtgtcatcaaagtcattcatggcagtctccaaagaatagagaatcccgattccttggagaggatcagcctgcatcgcccagtccaccatgttctgcatctcagtgggccagaatgagtaaatctcatccattatttgctcgactctctttgccattgctcggtcaggatcatgcggctggttggcagagaaatcgggacaagagcgattttccggaatggccgcagagaccaactcggaaaaatcggcgctggcaagtgaatcaagatggaagaattggatgatgaagttctgctcctgagccatcatgttcagtgtctcccgcagcgtcccggagaatgcctcagacggctcagcccttccttccttcttcccgcctcccgaagccagtcgaagcccagcggcagcccgcaccgtcttgccccgtcgcacggtcaattttcgtgcagccatggtgagaccctcggcttctttctccttctcttggtgcgtgaagaggagttcctgctcatcacccgttggtttgcgtgcggtgttcttccaagccaggttattgtcgcggaagtcaccttggtacgaaggcttggactgctgctcatagagactgacaaggctatgccactctgccatgctaacctccttagcaaatagcatcaaggcattataccgccagacctcctgacggaagtgccctcgtgcggcgctgtccaatttcatgggatctttggcaccgttgctccagtcaagacgtttttgttctgccattttgaaggcaagggccatgaactgctgcagtcggttgaggaacatggttgcaatagagcgatattcttccttcttttgcttgatcgcacgcatctggccgatttctgtatcagcatacacgccgacacttgcatcgacttgacgtttcttgttttgtccaatgtcagagtcgatcgtaaccatggccttgtacaacgtcgctagagcactttcagtatccttcagcccatcgggattgctcaaagatgcctctttgagtggtcccagctcggttacagatattgaaagtgtcttcaaaagggtctggagttcgttctgcaggagcttctgatttgctgtttgtacctgtagaccttggccttgggcttcgatataggcgacatcctcgtgaagagtctgtaatgtggtctcgttagccaactgtagatcaattccgatcccgtaatcccgaaacttacgttcagttcatgggagtaaagagtcaaaagaccatccagctcgtcacactcttcaatcgttctgtcaatcaagcttgcaagttgttcaacctttccttcctgttgttcaaggttcccaagccagctggtggcctcgacacggccaatttcccggcgaacatctgcttccaaatcctcaatcttctgttcatcggccaaccgtccgttccagcccagatcagtgaggatgtcatcaaaatcaataccacgtccgtcgagaatgccgggatcgatcccaagggcctggcaatatttcatagtgtgatcttcacggcgtctgcgacgacgtccttgagttgccggggatggtgaccttgaacgatcttcaacatttacgacaacatcagaaagattctctcgtgagacttcaggagtttgaacaggggtcaccgcgatctcttcgggtgctggctctgtaatctcgacggttggtgtctccggccctacagtgggtgcaggaagttgtagatcttgttccgactttggtaccattggactctgcgggggatcagttagggatcgggcaagggacggcgccggaacaacactggtgatgccatcagggcccgcgagatcggcctgtgactttttcgcggctgccagcagtcgctcaccagccccaccaatcctgggcttgaaaccagcataagcatttgcagcctttttccatgcgcctgcgatatccttggcgtccttcttcttgaccatagggccgagccccgggcgatgcggctcgaattcgccggtttctccggcctgctctgaggaagcttgagatggcgagtccgcagcaggggcagtctcgataggggtcttgggcttttcattggaaggctgaataggctctacagagggcagattcgcagccataatagcggcaggctctgcagctagtccctcaattgccggcgacgaagatggttcccggggctgcgcatgggctccagctaacaaattatctgatgcacttctctcttgaggcagagaggggtgattaaacgtgaatgccttatcaccaccaccacgttggggcgactttggaccaaagctgggcgtggggcgtgggactgtgtccctattctcattattggaagaaccagaagtagtaggacgaagtgtatcattgctgcgcatgaattctggtgccttagctggggctggttgggtagtaagaggcgggggtttgggaccgcgatcctggctgcgagcggaagatggacggagtgactctggaatatcggcatagttgctggattgtgctgcaacagtcagattatccgttcccctcgattctgatagtgaactcgggggcattgcatgtgttgcgctacgctcggctgcgcgtggcggcggttgctggtccagaggtggcccagaaagaagcgaatggggaggagatttatgtagatcaaagggagatggcgccggtctaccgtgtcctgtagatggccgagaaccggtcgacggccgagacatctgctcgcggctcttttgggtgcgaagtgtggggtcttcagaaggcttcctcttgacttcccgaggcccatcgcgactggtatcacgacctctgtaggacggctgtagcgaaggaggtatcgagctgtctgatgttggaggtattggaccgggtccccttggcggtggaccacctggttgtggtggctgtcctcttggtggtggaccacctggttgcgctggctgtgctggctgtcctgattgtccatgccttgacaacatttgtcgctccttgtcatcaaaaccaacgaggttggggacctttccattggtgtatttcttgtagatcttgaccaggctcccaatgaagaactccttctccttagaagtcctggcatgccagtagtatggctttccgattgtgaccgtgaatcctacattgcccgcccattctttttgttgctgctctcccggtgttctcggcacaaaagagccgaacgtttgaattgcgcttaaatcgtcgagcatccaagttttgccaatagagtaggtcccctcattgttctctcgagctttgtgtatacggactctacctgacttccgaaccgatataataatgatacgcggtttcttgttctccggtggcccgtttggcggggaagggctagaagggtgcgccgaatcctcggtgatgcgaacgtgtgttatataggattcgagtactggaagtaacagagagattagcagaggtcgccggcaaaacgaagcaaacgccttgcgatcccatctaggccctggaaataactttcgtaatgtgttgccaaccataccactattctgtgggagggcaaagccgaggaaatacgttggtcgtgtacgtacagagaccatcttcatccttttttgcgaaacaactatgaatgatccgcttcttctcatcttcaaaagcagcccctcttgtcatagtgcttgggctggaacccgaatcggagtgcagatctccacgattcagtggcggccctggcggaggcccacggggacggtctctgccattcaccatggtatcgagggacacagagctcacgtgtgggtagccgcgagatcaaggggacatggtcgggagggtcgggatcgggcgacgccactacgcaccacgcgccgaaggaattgaaacgtgtcgaggaaataatgcgcttgtaaactgcagaatatgatgagggacaaagcagtacacgttgtggctcaaagtaatgcaagtggccagcgctgaagtttgaattagctcatcaatgtgtctcggtggaaccttggaaggcggagagcttggagcggagtatcggagtatcgaattgatccggggttacctatgtcaacaaacgtgcagaatgtcagagatgaatgttcaattgagcgcagatttttcatgacgattgcttactggcgcttcactatctcacttactttggctatcctgatacactaagatgttatcgcagtgcatggcgatcatgactttgatcttattggcttctaactaactaactaattgccagcaaaaagttagtcatccatccccagggccggtctggtttcagttgtataacatgcgcgatagaaactgccgatgtaccataccttcaagacattacatacattattcgcaccgcgttcgatttccctagtcaatttgtgtccaccattccaactgcaatcaatttcatcactgggaataagaacaagcttgctgaagctagagcaattccaggtgatatggtgcagctttcaatcaaaagcgaaagtccttgaaattcaaggttctcttgaagatattgtgcgagacaagtgtcaaaaaccagctatagaagtgtccagctttcagctctaatctaaagcgaagcaaatcagaatcaaaagaccaaccggttattcagaaaacggtgactcttcggtatcaaagaggacagcatgactagaagttctttattcaaatgcagatcacatgtatatttccgaagttgacttcatgtatgtatgcatccatccatatcggtatatggcccaggtaaactttgagtgccctgaattcaggggcactattttctgtcaagacagggccgttgacctgtacaagcaaacatctatcttgaacctggtggtgctctgatatcagggaagtttcagaccggcataccatgtactagtatttagaaagaataaggcacaaaggggtggagactcggtctaaatatgcacatagattagatccgactagagaccgcagcggtgaagagatgtggccaataagagagcccttcgtagataatgccgaaatatccgcgcaccaatcacaatgcttactcatatcaaccaataacagtgaagctgatagcttaccgccttttatatactttttttttcctcccttcttttttggttcctggcagattatttctaaatagtctcttcttgccccgggttctcttccttcgctaccgttgaaacgaaccgctcagtcactatggcaaaggcttccagcaagaagacttcggtcaagaaggtaagcttcatttaccttcgattgacatatcgattggcatgatctacaaacagacctgactgacaatgccctaatttcacagactgattcttccaagaccaagtctatcccccctcagctgatcgcctcagtcgcggctttcttgtcggacaatttccctcagactagcgtcgccttcactaaggaagcgacaaagtcgggcaagcagagcgatgcgaaaaatgttccctctcttttggaactcttccaagcctcggagcagaaatctagcgtgaagaagtctgctagccccagttcttcttccagctcaagcagcagctccgatagtgactcggatgttgagatgggtgaggccactcgctcgtcctcttcgtcttcctcttcgtcttcgtcttcctcttctagctccgatagcgatgcggatgatgaggatgacgatgataagtctcctgcggctcccacctccgcccccagctccgctccggctcagaagtctgccggcgtgaagcgcaaggccgagtctagcagcgagtctagcagctcctccgactccaactcctcctcttcatccgaagatgatagccctaaggccaagaaagccaagacatctcccacccccaaagaggcatcttcctcttcgtcttcggattcttccagctctgactcagactcctcgtcgagctcctcttctgattcttcgtctgattcctcctccgactcttcttctgactcctcttctgagtcttcctccgactcctcttctgagtctgagtctgaatcagagtccgaatccgaaaaagaatccaagaaggccctgaagaaggcaaagaagacacctctccccgagtccgactcctcttctgactcggagtcttcttcatccggcagcaccctcgccgcttccccagagaccgagaccaagcccacaaagaaggccgtggagactgtgcagactacctcatcgagcgccagtcccgctcctggcaatggacctgccaagaagaagcacaccggagctcgccctacccctctggccctcctgagtgaattgccccatgaccacccctcgaacgactacatgtcgtacgcctatgcagaccgtgcctggaaggacttgtctgtgacccgcggcaagggattcaccaaggaaaagaacaagaagaagcgtggctcctaccgcggcggccccatcgacattgcccccggcacgacctcctacaagttcgaggattaaacgacgacgcttgcttttgccacacgaacgtatttgctagttcataatatcaggctatcgtcagcatctaatccaaaatttgccaccaaacccaggctttttgtcttggatgtcgctttgccgaagggaagaatcgctgtctttttgctgctgcaatatttgcattacgactcaggtttgttgcaatggatcaatatgaacagccagggctcttatatcccgcatcattctttaccaatttcactcagcatggcgtatggagctatggacaaggtcgttggacccaagatttgccatagaatcttttttgcttattagcttacatcattcaaaagtttgaaatccgtcctcgacgaattctggaagtattttcaattctccatgaagtaggaaaggacgtaacctacgaacacaaaccccttctagccttattagtctctatcaaaaacagtgttaggtacccccgtacaaaacaaaaaactataaaacccacaacctatccatcctgccttctccaagccccaggctcctccaaagtctcccacctacaatcccaacccgtatgcgtcccacgagcagcatccccaggcttaagatccgcaaacgcgcgctgagtcctcagcttagaagtggtagcggagtcctcgtcatccgggcgctcatatccagccaaattgaatgcctcggcgttccagcgcggtaaactccccggacccatattcacacccaggtccagattatattcgtaccactctttccccggaccggttaagtcatccgtagacgcaaaatcgagctggaccaccccgtccacgatgcccgtgtagacggtcggcgaggagggtgagggtgaggacattgtgtagatggggccgcggtaggggcctctttggcgggtgcggactgggtgtggagtttgttgggggaatgtagggggtggtgggtgggagaggaatatggagaagccctttttagggcggggttttgcttttgttctgggtatggtgttggcattgaattgcgagtcggggaattgtgcatcgaggtaactgtatgtgttgcacatgcgtaggtcgaagattttgaccacggcttcgccgccagctccggctaagaagcggtcatggccgaaggcgtggaggctgtaaatgggattgaggtccgtggcgtctctgtaggagacttcggagggccttggggagcgcaggtcgtgaagtcttacggtgtagtcgtcccaggcggttagaaagacttcgccgggggagcctaggttgtgttcattgagaggctcaatggcgccgatattggcctttgatttaaggcttgtagagtcggcgtctaaagaaccaattccgattgttcgatatacagagacaccgtctggtgtgattttcgagatagacaaggagttttccacatttccagttcccactgccactagtgatgaggatagcagtttggagtagttggttcgtgacgagccttccagtcgaagccatgtaaatggctcgattacttcgtcgtcagtctcggtatgatagaaagcgatgcttccattttcaaaatgagcagccaaagtagagtctgtgccactactcaaatctgttttatcgaggttgagtccaaatgatataaacttctgcttgtgctcaaaggttgcttcattgggagagatggcaaggtgaacaatatcacctcggacccgaccgaagatcagatgctccacatgggtatcgttgctgtatcgagtcgctgaggacaaaagatgcagagaacaaatgtcgtcatagctgctaacatgatcaatatcgttaaacacaagccagtcttcttgcgcgcgaacaccagtttgcttgatcctcatcacaagctgattggcagcaccccaggcaaggacctctttcctatcagcccaacgctggccattccaggtctcgtaagaatcaattgaaggtctgtacccgagagtcgggttatcttggcgagtcacctcgtgagaaccgattttggtcgcagttccaggtggcacgacaaatcttccgatgatggcttttctgtccaaggcccgcgacctagaggtcaaagctcgtgcagcatctttccagaatggcggtgtttcgatatatggaaatctacttcgcacaaacgctcggaagatccgagaattttcagctgtgattatgccgtgcagtcggtgacatgtctgggacagatgggccaatgcattggcagtcgggagatgtgttgcgatttgataaatgatctctgatgggagctcggagagcatcttgaacgcggaagccagacagagatgtgagaagagtaattgtttcgggctttcagactatcgccatcatttgttttccgccgcttttatatgttttgctgttcattgagtgtgctagaaaggggaagagctccatttgttcaaggacaagtagattcgagcttcgatttatattcaatttgacaattttcgaccgtcaagatgttgcaggtcagcaatttcatacacaaattgccccatgtgggcactggacccgttaccttatgacgtaagcatatgggctcgcttgggcagcagctcagcctgtcctctttttttgtgcaccaaaaaggaattgtatagatactggagcttcaaacttgagaaacaagactacattaacgtgtatagtagtttctaactccaaaggaaaaggatctgaaggcacagatgcagcaacgtagtccattatgtacgcttatcttatcgcattcccggggaagttgtaatgtcacaggtctcgttggacaagacaagtttccctatcgaatctaaaggcgcatatacactctcctcagcggaatctgattcactggctgtccaccggcagatgacgaatcagagtgagtgggactcgaacggtatggggcttgtaggttaatcttgcaattagggaacacactcggcaccacctgtaatacacggatgagtgttggctggtctaacagctagtggcatagccgcgtcggcaatccccattgtatacaaccccgaggtccggagggattcccagcttttctcatatttgcaaagtatctagattttcaccaactatctacagtggacggcaaacaccggcactcataatggcttattcgatcactgctcttgcggcagcattcttcgctggcctcatcttctacagagtgttcatttacccagtgtttctctccccgttgtcgaaaatccccaacgtgcactggagtgcttccatctcgcctgcatggatgttatggaggcgcttcacaagccgaaataaccggacaattcaggccgcacacgagagactcggtcctatcgttaggttaggaccatcggagatctcgattaactgtgtcgatggaggaattaagacagtttatgctggtggatttgagaagcatgactggtacccacgagtcttcgggtcatttgggttagtatagacaccgattcacagtaaacaaagtagctaaccatgagaaacaggacagtgagtatgttcaccatgacaggaagcaagacacattcaacccgaaaaaggatgttgtccaacatatactccaaatcaactctgcaaacatcccctcatatgcggatagtttcagacacagtcatcttcgatcgactgctgccgattcttcaagaagtgtcaaagtctggcaaatccatcgatatgcatgatctagaccagggcctgacgatggatttcgtctcctcctatctattcggtttgcagaatggcactaattacctgcaagacgattcggttcgtaagcactggcttcacctttacatgtgccgaaagccgttcgagttttatgcccaggaggttccatatttgaatggatggctgagacggatcggtcttcgcgtgatacctaaatactgcgacgacgccaatgaaatgcttgatgcttgggctctggacctatgcgatagggcagagcagatgatttcgtcgaccgagccaggaatcgagccaactgtctacaagcagctgaaacaatctctggacaagcattccacaaagaatggagaagcaaagccagataaggcccagcaacgactcgatattgcttgcgagatgtacgaccagctgactgccggctttgaaacaagtgctgttggtctgacatatttgttctggcaactctccctacacccagaagtgcagaacaagctccgagaggagctactcactctgaatcccccgattttatatcccaagacagccgatctgccaccagccaagtcaatcgatagcctgccactgttagaagcgatcgtgacagagaccttgagacttcatgctccgatccctggcattcagcctcgggtaacgccatctccctcgtgcattttggccggctatgcagacgtcccacctaacactagagtgaatgcgcaagcgtattcactgcaccgcaatccggaagtattcccagagccagaaacctggcagccgaagcgttggctggaagctgaaaactcgccggctgatttggaagagaaacggcggtggttctgggcgtttgggagtggaggacgtatgtgcgtgggaagcaatcttgcactgcaaggtatgaatttaagaattccaaccattgaactatgctgattactgcttggcagaaatgaaattggccgtggctgcgatttacaccaacttccgcaccacgattgtcaacgatgacaacatcgaggccatcgatgcttacactgtgaaaccgacaggtgataaactgatcctcaagttcgagtctgtctgagatataccaggaggggatcttgcaagtgcagccattgctgcaagctgtatgagctcggaatagaattaattcgatcaatggaaaagtatcaacattgcagctgaaagaataaacactgcttcccgccagctcatgcaatatccaagagcgtaaagtggctaagaatgatcgcaaatcgtgatctaataagctaggatagcaacaactcctgtccccggtttcggtagcacggccatgttcggcctcttcggcgagtgtagtatgcagactcctaacagcccgagagcccgaggatactaaagaggagaattgagagctgcgagtagaaatttgatccagcaaagttcgcagttcttcataaccctcatatcagccacaatccatcaggcaccaccaaagagggatggcagtgacattagatcgtgctgacctggtgattgatcattattatgtggaggatccatacacgcatatgtaggaaataagagttaatcaattgttctgacaggtccaaatcccacatagttgtatactgtacatatgagtaaaagccaactcccatagcctctgatgcaaaataagcagaccaaatcagaaaatcctgataaaggccagagtattcgcgtaataatgtatcaaaaagaaacccaaaactccaggtggacagctcgctcctgctgccaagtccggatagtcgtgcaaagaacattttaaccgagaacaccgtccttcttccgcgggccaacaaccttagggtacattctcatgaggtggtagttgacggtgttcttcttctgctccctggatttctatagatggaaataccttgttagaaggatgctgacaataatgaaaagaacggcgatggattataacgtaccggtgcatccatgcacttccgcaattgagcctcgagagcagagcagccctctgcgccgtatccagcggaagcccagcagtctgtagcaacgcaaattgtcagtcgagattcaaggtacttcgaagccagggcgacgagaaattgatagcgtcaatatccctaaggaagaggaacaaacatactcagcatagaggacatcactaccacgcaggggttctgctcattctgattcggccggcggacacggaggtggttgatggtgttgagacgcatcgggttgagccgggtggagagggagcctttgggtgccatggtgggcaattattaggttcgtagaactggcaatataggtatcaattggaacaagaagaggccgaaatgccttgaagcgaccgtgtgcaggattgacgatgggatactggcgccggcgacggatcttcgacaaacaaaatccgaagtttcgactccgcggaggtagatgactaatcttggccgcgcccccggccctcttcatctacctcgagggcttgccaccctatttacaagacctatacactctttttgatattgcaagtttgtcaaaaccaatacatggttgttgaatatgtctgggagatacggtttgccaacacagttccgtggcgtttcttcggtatgcacctttagagctccgatagctcccactcctaggcggttctccgcagcatgccacctgaaccaaacatcgcccacgtctacggtcaagacggaggataaagatagtgaaaatggctcgaaagaagaagaaaaagatagtccgatgggacgccgtctagctcaaatgaccgaagatgcgatgctagaaggtggacgatctgcgcgtcgtaacatcgagcaagcagggttctcggaagaactgaaaaataagctcgcagagcgcgttgctgcttcttcatttaggagtcagtatgctgctgctcattctatagtcgaaatgcccgtatgtgatacttataatgtcctactgtccaacagccactaacccacattccattattgcagtctgcggcagggcaaggcacacgagagaacgccgccgctcctccatggacaggaacagagcgtgtcgaggacacgactctgcgtatgctagatgacgcgagcaagccaatccgaatgccttacaaaatccccgaccctgtgaaccttagaatccccccgaagccgaaaaagtcccatggagagcgaatcgccgaagcgaaagagcgcacctctacctacacgctaagtcgggctcccgggttttccgaagaggagcgcgagcatatgcgccgtgagatgagggagaacttgacacccggggcgtattccatgccaatctcgatctcgggtctttcgtcgctggcagatgagcgaattcaagatgcgattgcacgtggagagtttaagaagatacgtcgtgggaaaggtgtaaataccaagacggaccacaatgcgaccagcgcattcattgatacaaccgaatattttatgaataggatcatccagcagcaggaaattgtgccgccgtggatcgagaagcaacaacagcttggcgcggaactcaatcgattccgcgaacgtcttcgagcggactggcggagacatgctgcgatgttgattgcgagcaagggtgggtccttggacatacaaatgaagcgggcaaaagcctatgctgcagccgagactcgactggcagacaaagcaaagttggaggctttgtttgaagaggatacgtccgtatccgagatcaacactgatggccggattgtctccaagctagagacatcccagagatcacctacaataaatgacagcgaaaaagcctccgaagatctagcccatcttccaccattgcgagaccccggatacctcgcaatcgaacgttcttatcacgaactcgccgtgaaacaaatcaacagtctcacacgctcatacaacctccaagctccagccgccgcccacaaaccatatatcaatcttgaccgagagctcaacgcatgctatgctgcggtagcgcctgacttggcagaggaaataaaacgccgagcgacagagcgtgcgcgtccgtcatcaaccgttcccccggtttcttccatcaagtttgggtcactaggaatggcgcagtctgtacatgttcgcgaagaagatcagtcgaagggatacggtataaaagagctgtggcgcgatttattcactaaaccctgaagacagcaaacgacaaaacagagaactttcacccttctgttcatcctctgtcaggctatatcggagataatgatacaccaataatgtgacatagaacatgagcaatggcactcgaaataaaacagacaaagcgggccaacaccacctcccgacccttcaatcttttccctcgcaaaactggattggaatcttccgctctgctacgaaaagaggatctccacacgacgtggctttctcgtcaaccacagaaagctcaaagggactccgacgacgccgacggtagcaacaataccaataccaagcccattgatcaaaatgaatgaggcagcattcattgtcctcatgccagcagcggcagcaggcaagcccaggaccaaacagagaatagagagagcagccacaatgaatgcttgggcgaggctagacaaaagtttacgcttagccatacgcctgatcgcgggcggatccgcgtaaagacttgatgattcccgtagacctcgccagtcgaagatagctgcgctgacgcaggtgataaaatgaaagtacgtcccgaaagcgaggagaaggaacgcaaccccgataaaatatgccgcacatggagagatgctcatgtacatgcccaggtacccattctttggattccaagcctggcaacaagcctcattcttagcccacgagggaatttcggtagtcatattgctggcttcgtctcgcttttgcatggggatgatgaaatgatgccacgggatctttgggaagtctcccgggggccagccggcttgctcaagatcggaatcgccgaagggtaaacgcgagatgacttccacgtccccgacccagatctcgttgacggcgttgccttggtcgtagaaatggtctgacttcacgccatggactgcggatactttgttgcccattcgtgccttggacaaattggtgtgagaataatggggtggtttaatgattctggtacaaagtagtaatgattcttgtatagaaagaaattgatggatgatgaggatgagttgggcatctttctcagttgactgggcaggtaatcccgaaagcagcaaaaagggaaggtgctttggtgtgttccttagtgaaggagatggatattcttgtcaacctcgagggtttgcatctattctatggtgaatcgtcctatctcgataggaatgctcgataaaaattgaattatactgtagcataatgtcattcagagatactcgtcatgcagataattgcactacggcacttggggatatatctgaatggtaatatgcttgatttcagactaatgaagtgtatttaagtatccatactctcatgtatctcatcctttatggaaatgttctaaaataggtcaaatggacttttgcggcagttagtgttctctcccctgtgagtggtcgccgcgatgtgatgatcgtgcatgagggcgcgtatttctgaccaacgacaaggctaaactagaatgctttgacctgggtactgactttctcttcacttcatcacatcctatgcttgcttcttatacgtagcccctccctctgtcgcccctcctctgcaacatgtatcacccgctcgtgtgagattcgacgtttgaaatgtcgatcagtgactacgacttttgaaattattacttctcctcacccccaatatcttttataatcctggcggaaatgactaccccggttgtcttctttttgcctatcctttttactgtcttgattgtacatagtacctcggttcaggcccagaaggtccaacgtcaatcaaaacccgctgcgcccccaacagtggacaagccattactagctattcaaattgggagcattgcgggcgcctatgtgatcttcgtcgctgtcctcctagcgctacttatcttcgttggacgtcgcctgcgtcggacagttcagtcgtccaactatacactgcatatggaaattctgaagcctgtcagacctcctgtcagcatggatcccagcccgatttctccagtgtcacacaatctccctagtcccagatcaagtggattcaggtcctgggggtccttgaacagaagtaccaggccgtcccaaccatctatgaacggcagcatggtgaccatcgacgagtccatcgtcgcgaatgaccgtcaacgagcccagcatgatatggagatgctctatgcggcagttatggaacatgacgcccagaaggcttccggaattgatctgtcggtccgcgaacaagacttccatgcacaatcaccggacagtcaactcacaaatccattcactgatcgcggctcccacggctcagagaactcattagcaccattagctccattgaagtcccccaccaaaggattcaacagctcccgcttatccaagctcttcaacccaggctcccgcgccaatccagacccgagcaaagtgcgctcgccgcgtctggctatccgcaaaatgcctatctcctctccattagcctcgccagcagtggccacgcctcaagcctatgtgtttgaaaacccgcctctttccccgcggatttacaaccccggtcctcctccaatggtgccgcagcagcatgcgagtgagtcaatcaggcctgctcctgggcgtgcccgcccacctgcgcctctcactctgtctaccccctccccttcttcttctgtcccgtccaacctgcctttccgggaggcatacccgccgcaaagtgccccggctaccaagaccactatcttggaacgaccgatgaagaatcgggcgggtcctctcacgggcatggctacaccatacagtccgtacatgccatttactcccgtgacgccctttactcctgggcgcacagtcacaaagcgacagcggaagcgggaggagcgtgggaatggactgcaagtgttgaacgaagatgatttggttaaggatgacaatgatatctggggatgaatgtgtcaaatttagtttaggcgttcgagtgcattcggttcaatccatcgtttatctatagagaactgtcacacctacatacactggctgtataggtctatttcagaatctaatatcctgcatagctcgtctctagatctatatctacatcttctccttcaaatgtgtattccctctaacaatcgcctcagcaaaatccgacctcgtcccggccttctcaagactcaaaagtgtctgaatagtacaccccctcggcgaagaaatactctccctaacaaccgctggatgctgtccagactccaacacagcagacaatcccctgatcccctgcaaaaccaactccatcgcatccgcccgcttaaacccctccgcaacacacccatccagcaacccctcaatcggcagcgtcaacgtcgccatcgtcgcgccaacaagcacagtcgccaacccgatctgctcagctcctaggtacttaaccgcaccgacatgcttgaaaatccactccgtaaccagaaccatggctggcgggattgacggcgccggcgtttcgatgatcgtcatcgactggccgaactgcgcgcccatgttcgggatagctttcatgaggtgcggttgatctgcagcgccgggatctgggttgatgaggcgggttagggtttcgcacgattggcctgcgagcatgctgatgacgagtttcccagcgagggcgtcacggacgccttcttctcttagaacggcttcggccatgaagggcttgcagccgaggatgattacgtcggcttcttgcattgtttggacggtttggtcagagacgattttgattagttgttggtgctcgggggcaattgttttttcgagacgggatgcggaactggctgtttttgtgcaggcgatgaagcgagttatgggatttggtgttgggtcagtgcttgtggctgagaatacgctgtttaggaggcctttaagcacggcgcctcccatgttaccttggggtttgttagtggtagttttactatgaatgttatgtttacttaccgcatccgatgaatccaagagtctgtcctgaggccatgatgttctgaataccgagagagacggagagttgattgagttgaggggtttggctatctatttgactcatatgggatctcgggtgaggtgtccgacgttggcggcagccgatgccgagattagttttaattatttaaattgcagaagaacatgtttagaggattatcttttgaagctatatttgagatgatacgtcaattgccctcgaatgattccccgtgcttctttccccatgtctatgcaagattacttagaatatcacccattgctggacggagggtcaaatataaagcccaattccttgcatgagttatcttcgagacctgcaatgagcacaagtccattcattccattattcacaaataatatctgatctttgcctcaggcgctaactccgccttacaagtggcgtataacagattaccgcattgggcttggcttcgtgttccccaatgcagcagggattcccgctatctcttcaatcttcaatctttacactcactccttttttgcctaagaccctctatggctgtcaagatctaagcctggacttaattgtcgaatgaacaacactgttgtctttttttatcgactttgctgatcggccccgctattcccccacctcacaagttgcaactgtcgtcatcctcggagaagtcgacttgctctttccggccgagttattttggtggacagtactcccgtaccttgtctcttactccattagaattcgtcgtcggataacttgtgtgtacaataagaggctgtaagttatctcactcttatcttggcagaggcgcggtttggactcggactgtcttggctaactggaacttcttcgcaggtctcagactttctctcccctttcctccactactcgtttacacctctctgtttttttgtgtttccagtacggaccgcctacatgactctcaccgtcctctcccaaacccagctccgcgagctgctgcacgcgctctctcgcgacgagatccttgaattgcagcgcaatctcggcgaggctctacgagaatactccagtggatctcaggaggaaggctgctcggcagcttaccaaccccagcgaactgccattactcgtcagaatggttgcaccaccctcttcatgcccgccagcacgggcaagaccattggcatcaagatgatttccctgcaggacgggggcgctgccggctgcgctaatgaacaggagaccgtggatgcacaggagaaggaccagatttcctcgcgcagacgaggctctttccggaactcggtggcttccatatcctctgatttgagtgatttatctttgggctcccaagaagacaaggaggacaccaccaacaatgacagcagtgtggcaggatcaagcacggatagtcccacactcctcactggttgtgtcaatcagcaaaatgtcacttcgaatatttctagaactcttggcgcttggccgggcgcaggaactcgtgacacatcgccgcgcggcagtgtgacactcctagacgacgaaagcctgccattcgccttgatcaacgcccatgagctgacggcattccgcacggccttggcttcgctgatgatgttcaacaggcgcaagaaggtgcgcactcttcttgtattcggagcgggcacccaggcttactggcacatccgcttgtcattggttctccgcggtgacgacatccgccgggtatacattgtaaaccgttctttcgaccgcgcagccaaacttctgcaggatatctatgggcctgaaaacagcgaatggcgcggggacgtcaagttttccgcggtcagtactgatttcggcgagtatagtcgcatcttgaaggatcacgtgcgcaaggccgacgtgatcttctgctgtacaccctctccggtgccacttttcccagcggagtacctcacctcgagcgaaggccgtcaaaagggccggttgatttgtgcgattggatcatacaaggcacacatggccgagatccacccagatatcctccgagacgaggtcactgtgcagggtccacatagacactggcacaagcatatccaccgcagtggtgtgattctagtggatagtctcgacgctgccatgaaagaggcgggcgagattattcaagccggaattaaaccgaaacaagttgtcgagttaggcgagctactgatggttcgtaatgccgctcgcgaagcggcgaccgtggatgaggaacagagcttgcgtgagtgggcacaacgggggaacgtcatctacaaatcggttggacttggactgatggatctcgtgactggcggagatttggtgcgcttggcgcgggagcggaagttggggaccaccgtggaggatttctaaatgacttgggcgacttggctttgcactttgccctttgcacttttaacgacttttgattcgatacctttttttgcttattttacattgctttctattggccgatcttttttctctgggcgtctgttgttccagggaaatttcgaagatcaacagatctgccgaaggtgccacaatatctttaaattaagagaaacttgaactggaatacatgtcagaatacacatggtatgactatcaaatagcatttgggagctggaaatgagaacaaggaacaatatcatctctatcatagaacctgaatatcaaagtaaaagcttgcacataacctccaatgatagtgggctgatggtctgcgtcatcgggtatgtaacctccaaggctctcggacaatcttccctctcgtttcaaacgtttctctgagcaatctcccgctgcgcattaccaatccagctattggtattggatcttgccctagctgctctagctgctttagctgctgttggcgcacgagtcttcccttccccgcgcagtgaggggccaacgcaacgataaagaaaaagtctgctctactataagaagccttatagctccccagaatacaccccccagacatcctcgccatgcgcaacaccacctgctacttgcccaatggcctctcctttaatgtatcgcccgttttcgggggagtcaccttcaaatccgccgatttcaacgcacagaactccaccttccccccaggttggacgattatgatcaacaccgagaatgcgagcaagacagacgagcaaggagatgaaccagactcagagaacccccgcgacggtgacgataatttttcccgtttcactacccccaccttagcccgcgattccctctacatttcctatatagtcaacccaccatcaagcgagttcaagcccgtgacctcacccacacgccagattgccatgatgctctgggcaactctatggtggtacttccacgagcccgaaccagacctgcacgtggagaccgtcgcatcgagcatgaccccgcgcgacggacgaccaaaaggcgtatggcgggtcaacatcaagcgcgaaggaatcttcaaaggccgaaaccttctccagaagctcgagcgcatgggactaatagcgaccgaagactcctccgtcggcctccagcccatggaatcccgcgactcaagcagctggtcaacgatgttcgtcagccggcgcagcttctggcagctcgacccacgcctattcctcttcacactgacgccccgcggaggccgtccatcaacacctccctaccggtcacggaattcgtctcccgcgtcgtcagagggtccgccccccgcagcgccgctggtgctcgcgcccatggaggcaatcttccacacggcgaatatgggcccattcacctcagtaggaccgttcacgtccggcagccatctacccacatactatccgccgccgccgatgcagttcacctccacgaacggcgtgcgacaccccgtgcgcccgaaaccgccgcaccagggcgaggtcttctacgtgcgctacatccccagcctgagccagtatctctcattccgcgtggcgtttgtgccgatgaaccccgggggtactgctagtcggcctgggacgcctgttagcacggctgtgacgagcatcacgcaccatctcaccaagaatatttcctcggatctggacacgatgcaccggtggatgaatgtcccgcgggtggaggcgatgtggggtgaaggtggggataagtccgtgcaggagaagttcttgctggctagtctgactagccgccacagcttccctgtcatcgggtgttgggatgggaagccgtttggatattttgagatctactgggtcaaggaagatcggctgggacgacttgtggaccacgtggataattatgatcggggcattcatctgctcgttggggaacaggagttccggggtgcacaccgggttgcggtctggctgagtgcgttggtgcaccactgcttcctgtcggatatgcggactgaatctgtggtgttggagccccggattgataacctcaagtgagttatggacattgatttccaaggaaaggaggatatatgctgacttctcccagactcattaattacctccaagaagcaggcttctacaaagaaggcgaggtcagcttcccgcacaagcactctgctattatgaggatcaagcgcgagtactgggaaagcccggctctatagagctgtcacggcggcgatttgcattgagacgatcacgagtaacgaaacagctagcattacctggatttgaaatttcttgctatttgacttggccatttatcatgccgttagcccaatagaacgaccggtatggtcattgcttattgactagacctttgatttcatcttctatcttctagactcctttccctaggttgacccgacgagaccgtcctgcttcgaaatagtgtattcccagctgcttaggattcgtatcataacgagagagccgtgatatgccgtttcccgaggaccatagtacgacgttacgaaatgttcgatgcttggtccggaggctcccatcatgtcttctgaggctcactcatttcgcagtagtaaatggtagattggcaatctagagaactgactaatgttgatggcttgatggaaataaaggaacagaggcctttaagactacaaagaaagggacctgtcaaactgtctgagcaagaaaaacaatctgcgctcattgcaacatttctacccagactcatctgatgtcgatacggttgcttagcaatagcgatatataccccctaagcccatccgaggctcttagcgagaccgtagaggcatatcagtcctgtcccaagtaacaacgattgtcccatacgacaaagatcaaggcgttagcacaactgcgcattcaatttcgaaaacgcctagattcgctagacccacattctctcaacgcttcgtggcctgattcagataccgtatttccccgctaatagggtcgttgaaagtagcactgtttgtgtacagagaatccaggactagcctcacttcatggaggagatcagctccaaattggggatattgttgagctaggtcggtaaatgtgtgccgtttgccttggagataccagcaaacggaggttgcggctaaagtacggcgtacgggatggccgttgcgtaggagagttcctgaaataatgtcttcttctcccagccagcgggtgttcttgtcgcttgtgtcgaaatttcggtagtattccttggcatcgggatgtggattggcaatagccttcttgatgtatcgggccgtctgggattctatcctggtaatctggtatttgtccgcgagtcttgcgagctctatagtagttgaaatacgcttcttggtgtctttggtatcaatcttgacaaaacggaggtatagccattgaaggagggcttcaaggctttgcttagagacaacgccttccatttcttctaggtccactgtctactcttgggcctctcgaaaatgaccttcgaacatggctgtgaaaactggcgactccgcgcagaggagtcctttggaaattgtgtattcacaaccaatagattggattcggattttaacaacaggaccatgatagagtggaagcgttctaggtaatggagtgttagacagcgtggaagccactcccgagttaaagcctacttacgctgttgcgaaggacccagcatcttcctcatatatctcactcattttcctcttcatagattgactgtttgaaagaccggtgttgcaaaggagaatgttaacgaaagatatggagatggctttgtgatctaagcaaagagagaaggctggaggaagctacttaaacatctgtacctgacaaacaaggaaacaaaggcaccaggccaatctcagcaccaactgccaacgaattcctccaatttcaaactcatagattccctagatctcacacttcaccccagtatctgcccaacttccttctttttcccgctaaaacggtccgtgaccataaacgccaacgcagcgtaactcagtgtactattgctagaagtggatgtgtaatccagatattaaattttctatctaaaattctttagatatggtatagtaattccgatacatagtttgaatttgtacggagtacgcgtacagccttggcatgtgcccctggttggccgcgtggatgatgggcggtttctctggagataaggaagttaagggtaggattgaggctcaggataaggatgattattcgcaagggaaagggggatgaggggttatgaagggatatgcaatataggatcctagaaaactacgcaaggggtgacttcagcaccgccttcgaaggtctcgacccaaacccaacttaaaagtctaggggtctacgtacttatgactatgaccgtagtgagacttatattacagtattatacagcgagatccaaaatcaagttgagtttcattgtccaagtaggaagtaagtacaaggtacgttgagcgcgagcaaagaattgtaagcgtagagattgttggatagcatccagagaatgaaaaacgagtgagacggaagaccacaagcataagaaagactagatgacagacatacaaatgccgacacgaggcagatgcagtaacgagtggaatagataagagagatgaaaaggaaaagacgagaagaaagcagaatgacaactttcacgtaatcaagctcatacacggtgttagatgacatatatgaacatcaaatagtaagtgtgagcgaggggtattggcaacatgtgcgtatcaacggggtgaacagctttttcaaaagcggaaatatggaaatttgaaaaggaaataaaagagatatgggcatgtatgagtgagagcgtaagagtcagtgagataggaaaaaggagagatgcgtgggagtatcggtgattaagtaaagatcagattgctaaaaggggaaaaagaaagagaggcaggagagatcgagaaccggctcgatttagtgagaccgacgaccgcccatgtaagagccggtcgcggaggcaaggaagcgagccacgaagccgccgctgtgcgcgtggttgctggtcttcagcttcttggatggctggcggataggctccgaggacttggtggattcgatgtgggcgacgtccacgtagctgtggttcagtgagagggatgacgggctgcggttggggtccgcgagcatgaggtcgtcggcaccgttcgaggaaaccgtactgatggaagctggtgtgcctcttgagcttggggcgatgctggacgagcgcgagcagagagagttgaaggtctcggcgtgggagagggctggcacgtcgccgacggatggtggggagacagagcgggtggttcggctgggggatgcacgctggcgttggtaggggttgtagcgatcgtgctcggcgatattctgtgcggcgtagtgggtgttgtgcatgcttgggcaggagacgtggctagggagacggcggagagagttgtcgtttccgcgacgcgtctcgctccgggcctcgagcttttgacggcggagtcggctggccagtaggtctgctgatgagtgaagacggcgcctaggggtgggttagtatttgttatgataacaggttgtaaaatgggatgctgtaccactcgcggtgttgctcttgtttgtggagatattcctcatcggcgatacgttcttgctcttgggctatcaagcgctggcggtgggggacgagaaaaggctcgaaataagtgaagagatcctgctcggtgatgcgcaggtcccagtccagaaggaagaggagctggcgttccatgaggttgacctcagggagagagaagccgaaaccttcgaatcccttcactgcagtgtaacgggcccaatgcttgttcttgggactggagtcgttcagatttttggcggccaggatgagcgaggcgaggaagatgcgatggacagtgcagcgcatgccctttgcgactggtggcagacgtgatcgaagacgaccgaggtagacgagacagctcatgagagtgggcacctgcacctgcgaccgagcaacaagtgacgcgataaaggtctcgatcgggggaagagcaggcaggtcagaggggtccattggaggggtggatggtggtgtaggttggccattctggttgaccgtgttggtcacatgcgcctcacagcggatgacctgggctgcctgttgagccaggtgtgtgatcatttcgcgagtcactcggacagtgacaaactcattgagagcagctcggttgagtgatgctgagtccatcttgatagagggatatgacaagaagttggatatcggagaagagatcgaggatgggagttaaatatgcggaactgagatcaaaaaggtgatcaaggccacagatagattgtctcgggacaatccaattcagaaatctttgggcaaacgacaaaggtctttgtatgttggcggtatcagagggagtcgacacagggtgaagcaaagaaatccgatcaaagaccaagagacacaatggcgaacagagaaagtgaattcctggccggcaggataactttcagatcaagtactttctttaaaaaaagaatgttgcagtaaggatgggatagttggggttgtcgtgtcaacgcctatcgatagccctaactgagaacttctccaaagtgaaacccgaaatttattcgagagagacacaatccacagttcactgcaagtaagcaatagattggaaataatgtctctgaggggggaaattcaggatagaaaaggcgaaggatcaaaataaaaggcaggtatcaaaggaaaggatgacgacgttgggcatgatgaatctcgtgaagaatctgggtggaatgcctctctagttatagtatctggtatgcgccagagtgggaggagagaggggatacggttctcccctgcaaggaacggccatccagttagaagagagaagatagccaacagggatagaacagagccaacctgcatagttggatctaagatgctacctatttttttggcgcgcggagtctgacagggaaagtgagctgatttgtcgagagagaacggatgatgtacagttgatagactattattgtacctgtgcgttattatccctagattcatccaatagagggttggacggttggtttttggctgttggattgcatcgactggctggacacgatggactcggtgtgatagtattctacattctacatgaaactaaaataaggggcgtattgggacagggcgacgtccaacaatacagctgatctaggatctagaatatgggcccttcacaatgattcctatgaaacgcatgaccgtctcagatctactccgtatgggtcattccattccataccaaaataggatctattatctagtcaatcatcaccaagaacagacttcagctgaaaaaaacacggtggcgatttcaggttggcgccgtgaactcgcgttagtgcccaatcactcgaaacctgtcagtttccgatctgatcgccggaatccctgtgaaatggtccctttgacagacttggctgtcctgtcatttgactggatcccaatccaacggcgcgaatatagcgtgttcgagggggagacatgccactcctggaggggaaaaagaaaataaaacgatcccaacctgttggaattatccgacatccacctcacatgaggcaggtcacatcattccggacccttttttcttttttcctcttggatctatcgatttccaacctcttcccaaccacccggctatcttttgcctctccccgaccatgcagtagagccgtgggatgcatgcaatgttccgtgcatagctcttttagcgtgttggctactctaaaaaaaaaggcagcacactgcatatgcatctacataagcgcccatcctctttccactcccgacttcccgcccagcgcttacaatcccaacatcgtggaagcgctatgacgtttagctctaattttatcattttctttcgttattcttagatttgtttctatacgcactacgctcctgcttttcactaccccggacgtccccatgcgcgggccgtcacccgccgttccgcctgtcccgaatttgggatgctggaagtgatactgcgcctcatttcatcgggcgtctcgctgttggtgatttggatggttggttaagagtgctctatgcaggtttccaacgtttgttcccacgggtgctcccacgatcccgcaggtgatcccaaaggtgatccgcatatccagcccaggctccatcattttatggcgccgttgggattctcagagctttgggcccggtgttggaatggggcggtttcgggattggagggtttgtttcagtgttgggtggcggctagaaatcgtatgggtgagatgcaacgcgaagaatgcgaccgtgcatatgcggagtacgagtcgcaggctgatactaatgtgtgtatttggcattatgacaatggtggttctatgattggcagtgattatcgatccggtacttggtgaattgtgattgattacatttcccaactatcttcccaagtcccagtcatgcccttcgctaaaaccatggaatcacttgacaattaaacaacagcgaccgagtaagaagaaacagtcaacttagcagtaccagtgaaaggctcagtgccagcctgcacatcaatcaagtatttgctgttgctcagaccctggtcgttgacaaggtacgtaaagaacttcaacaggtcaccggagaagctcgtaacggtcgacttggcgacgaagctgtaaacagtcatctggccattgggaccaacccacacatcccattcgacaccattgatagtaaccgtcgcgatggccttgccagtgctcgagatcgggcccgcaccgcccagagccgcaagccacaccatgatctcgtactcctcgctgccgtcagcagtagaactgagaaacatgtcgtaagcgacatcggcgacgatatcggtagtcgagtagctattcagagatggttagggctgttcgttctaaagaaaccatgtgcaccaggcttacctccagtcccaaacggactcgatgctgctaatagcactcagcgtcttaggagtgaactgcagcgaggcactggcgtagctcttgacctggttcgtggcaccggcccacgaccacgaggtgtgccacgcgatcttactgccgctgctcgagtctagccctgtgcactgcgtgccggaggggtcttgggcttcgttccagaggttgttgtagaggatgtaggtgtccgttgtggttgtgccccactgatcgcagaagtctgcgcgacgagcgatggccttgactggggccctggcggcgttgcccatggccgacagtcccaggcagaggagggacacgggtgcgatgaaggacttcatagtggctttgggatcgggtgttggtctcagggacagatgggagtatcttggtatgaaattggagtctcacaggatggaactggggttggagggttgttttatacatgccatattctctcgggaggcgtccgtttggggaatgacctgcaccggcggtggattcatgttccgtatagagtgcggaggactcctgtctcacatttcatattggtacgagttattatctccgtcgagctcatggccgggactccacaacagccggataatatcaaaagcttgctcggggccacggccagccgggattgaaggaatatattgctgctgccatgacgtgcatcgtggacaaatttttccacgactcgaggtttattatgcagggcattatctactcatctgcggattcggaaagctctccggtcgttggcaccgtacgtgaggccgtcgcagagcggggcgggggattactgcttctagaacgcggtcaaatcggaggccgttgcttaaaaggtatccgctttgttcgagattcccctgaagcataaattgtcggtttgcatttgcgaagtttttccgtggtgtgactggctttgtgcaggagccaggtcagtgtaattgatttgcgtgtcatatgtgatggtcaaatctagagacttgaaggatacatatgctgtatgtactcacgaatcagctacatcgtcacttacgcctgttcttcatgcaccccgcaaacaacacaacataagactccccagaaaatggatggtagctaactccaaaggtctcggctgaggacttgctcctagtcagagattgcgggatgccgaccgtttttcaatgggagatgatcgacattttgaccgttgaattcaagtcatgcagaaaccaaattagaatggttcttgccatcattcgacaggggatggtttcatggcaagccacgtagctcaagtatggatgttacacattcgtacgcgctcacagtcaggcactataaggtatgttctgtctagcagtcccctgcatcttcggaaattgaaaatgggccgattgggacgaggactcagacggagaggcaattgtggctaccgtcatgagcaagtcagaaaacccgaaactcatggctgtttatcttacacggtgcaatcattttgcttgcgacttttcctttcagctatgtcgtggtcatataggcaagggtcggtccgtcagcatagcgcaggtcctcgtcattttggatatcatcccaagtcaactttagataattagcttctctgatatcacacaaacaattcaagcttggattcgatacattcatcgatatacggtggactctagtcgagattagatatgtatgttgtacaatgttcagaatatatatatcgtctcaatccaggtcaaacctcgggatacccatctcccatctctttatactgatagaaacagtcaaactagccatgtgtcctagcatcgacagtccgtcatatgcaagcataccaagttcaatgtttaagaatctgagcaacaggatgacctcggggagtagtttgatatatcttggcatcgggttccgcggactgcggcagttcccgcatacggatcacggcgatccgaggtgagctgtcattggagatgattggactgtcctacctgacaggtgcagacgtacggaacatcgtcggggaaaggagatatcgaggacgcttggccaatagaagagacgataattcggattgtgggcatccggcatggcctgttgatgtaaaacaaacagtgcaaacacatacaaacatatacaaacacattcaaacactacaaaccataggattgcaatatcaccagcatataggtgcatgtattgacttaagcatgagacaatgagcaaggaattgactgatatacagtagtaatgaatcgaacaaaagcgagggcgttttgactattttcaattgttttgcttatatgccccactaagtggaactccggggatttcgctagggggtggaattaaatttaagtgctcgcatgcctcttttttcaaagactccaggtcccttccccaattcccaagatgccttctaaatcctcaaagtcttccagctccggctgccgctgtcgctgcttctccctgaagagcctcagctacctggctatcttcctggctctattctccgccgtctaccgataccttgatgcgcgcctggagcaattctacatcttcgacccggtgcacctacacgatgtatctcagcgcgctatcagcgcccacggcgaagacacccgctctgtcgtcaactttatcgtcgccgagctggagcaaaaagtcggtcccaactacctaagcacccaggaggagtgggttttcaacaacgccggcggcgccatgggcgctatgtacgtgattcatgctagtatcacagagtacctaatcatcttcggtgagtttcgcgcccgcgatcaagtctactgcattccttttcccttctaatcgcattcaatcttcgcaggcaccgctatcggaaccgaaggccacaccggccgccacaccgccgacgactacttccacatccttcagggcacccagctcgcctactcccccggagagttcaagccggaggtctacccggccggcagtgtgcaccacctagtccgcggcgaggtcaagcagtacaagatggatgaatcttgcttcgcgctcgagtacgcccgtggctggatcccccccatgctcttcttcggttacgccgataccttctccagcaccctggacttcccgacgttatgggctaccacgcgcatcacagcccgagagatggtcggcaacttgttacagttgaagctataattgagcatatgattttattattggcatgcagggttcagttggattgatgaggtctatgtggaatgtatgatatgggaattggggtgcgatcctagcacctgaggtgctattttggtaaaagttagtagatatagtggatattcaattgctagcaccgagcacatttttaataacatcatcagctgactgcccttatgacacaggctattagacttgagctgtgacctaggacgctttgcccaggctgctgccgttgaaaagatgttggaagtatggaagccaatattccaacgtcgtactaatcatcagtagacggtgagagacctgatgtcttaatcatttgagaagatccccaagtcctgaagttcagtactacttccaacgacggttcactagagctacggaggccgtgatcgaggtcgaagatataccgaggacgagaatggaaataacagaagaaggctgagataagcctttataccttgtttgtcaggcttccacaggcttgggccttagttaacagccaaaaacgtatctttgttaggaaccctgcacgaacaagcctatcatgagcgttgacatttgcctaggctactaatatgcatgaatccgcatactcgtatgccacgtcacagagagcactcagccgatgtgtgcgtgtgttgctagcttccaagtgttccatcgaaactacgctgaccattcccatttctctcactgatgcaatcttctaacatctgttactaggccatatgctcatggttgctcgagcaaaatgataccctcgaaggaatttcatcaagcagttcaaaacctacgcggactaacggatcaaccatccgaagaacactcttatcgaatagaaattccaccttctcaatcagctaagcacttgctaaaagctgaggatgagatgcaacttgccgatgatattgccttcctaggtcaggcagaagagggagccaaaaatgtgacggctgtgactctccaggagaaagcacctgggcttgtcatttgcctcgcgagcaaccacacgccatccgataaaagagttctggaattgaataaaaccatggctttggtgagcgagtacgcttctgaaggtagctccttgtatgcaaatgtcatattcagggttgctgacttgtacaggaaagcgacggcgtgaatttcgtgacaaaatattcgacatggttgttgacatccgcgaagatcgaattcttagcagaattcgtccgccatggttaccacagcctagccgctattacaaactgaggccgtttctactctcacaggttcaggtatttgttgatgagatttccgttatcaatcgtcagtcagcaggttttcaatctctggtgcaaccggcgcgccagctgatatcctgccttttacctttcaaaaaacctgttccacagattttgagaaaggaatatcagaaaaatgtgataaaaagctgtgctgaattggctggtgttggtgggacaggattgctggaggaacaccttcagcggctacaaatttcagctcaactccgtgatagaggtggaatacgtcaaattgacaagcttgcgcgatacttctttgtgtgtcgagatcttgtcagagtcggtagacgtccagagtacaagcccctgttcagcaatattgcgattgaaaccttgaaagcttccaaaggaaggccagtaggctccaaagtgtgctttgttcacgcagagatgcagcagattgttcactacacgaatcatcctcatgatcctagtccgcggtttatcggatgtagcaagtccgcatgctacctctgcgatatgttcatccagaagcatgggttataccgaatctcacatgctcaccggcggctttatgacctatggacactgcctgatttggattattcggcttccaaagaggctcaacagcttcaagtcatattaaaatccatgaccaaggagatttcagccattgccacagggtttcaacgaagtcctcgtcctccgaagcagtatagagcggagagcattgcattcttacctcttaccagtggctcgacagcgagcaatacttcagttgccacgcagaaagcttccatgtcttcagtatcccccctattgagtcttaagtcggactctgataccaggattgcgagcacctgcttttcgaagagcctgtctagcagaactagcaatgcgtcttgtcttttactcaaccaagatgacctgccatattcacttgatataaaagacatcaaacacgactttttggtgcagatcggtgcaatctttcttgatgtcgagtttgttaccactggccggctctcaatccgccacgcaatagataatacactacctaaagatgtcatagatatctctcatttatctacaattagtgagacaaaggtggctcaaagtctaaccacgcaactatccttgcgtcaccctagcggttttacgataattattgactttgtccgggatgaggttggacttgatcacgaaacagtcattcctgtgcgtccggatgactaggtctattgaaggttacaattcggaatactgtctatatagcctgctagtaacaataacatggtgaacctctatcatgattggttacaacgagtctaaatcagcctttcctcggccatgaatcgcttgcaaatccaagctactcactcatctccccaagaagatcctgcgcattatgaagcaagattcgtctcgttgtctctgatccaaagacactctgcaatccatcatccactctcttagccagagactcagccaacgctgcaggggtataggggtaatcactcccatacagcaatctagacgaatcaaccagccgcagaagaccatgaatctgatccgggaatggcacacccgcaagatcaaaatagaaacgcgtccgtaacagctgcttaatcctctccccactaatcccatcccctggaccgggaaccatggacgagaactctgcgatcctttccattatcggaggaaaagtcgcaccgcagtggcaagacacaaatgtaattccaggacagcggtcaacggtcccagaggtaagcagactcatgagtgccctggtcgaatcgaacataaactccataataggcgccgagaccccagggagcggtatctccttctccagggagtcatcatcgtgccggataaaacatgtagttgggtgaaagaaggcgatggtctttcgcgcactcaatttgtcaaaaacccgggtaaagcgctgatcacccgggtagatgccatgcgaattggtcagaatctgaaaccccactgcgccaagatggtccagtgcatagtctatttctgcaagggagccttccacgtctgggagggggagagaggcgaagaagaggaagtgggttgggtgatcggcgcagattttggacatgtcgatgttggcccgtcgggttacagatcggccttcttcgtcatttcctggggttaaatgtgttgctggagaggacatgctcagcactgatttcttgatttttagctggttcattagttcaatgtgtgcttcgggactccattcctgaattcttgtatttagtgtgaaagttagatggttgttcccgttcaggcactcactgggatcgccggcattccatctgggtgacctctgcccgcgaagtcgctctgtaggcaatactcgcgataagagggtggtacgcagtgggtgtggatatcgattttctccattttcgatctggtgagtgtatagggagtattttctgggggattgttgctgagttcatgtatgcctgccactgagatcgacatgcctagttcgtattcttcaccggttgttcaaacagtcacttattggttactgactcgaggcaacgacaaggaagcatgtcgtgtgaccatctccttcttattgccaatgctgtggaacaatgaaaccaacagcctggtttggcaaactgtatatctttagaccgaaacgaggtctagactaatgactatatcaggtctactttcggcagttccttcggtacgacaatcaatcccctggcagccaacagccgggcctgggtgagcttcaggaaccgatacgtgttatccaagatcggcgtgtgaacacccttctccctcgccacacgcaaagcattccccagaatgacctccacctccatgggatttcccttatccacgtccactagcatactaggccggaaacacaactcgagaggagtagcatcaaccatctcatccacaatccccgggccaaggtcatacccatccgccttcgcaatggccgccatctccgccataccgggtcttatcaaactatactcgccgccgaatagccggactgcagcactgtcaagctgagtgagagcgcacatgggattgaaaatcccattccaaagcaccttgcgccagcgatagaagacgatgtcatcgacaacattcgcatcgacgactttgctgctgttataaatcgtcgcaaactcttcgagcttggcgcgctcaaacgccgcgtccacggatgggttgcggaatgcgccaatgtggaatttgtcgtggtcgtcgtgtaccacatgcccgttgtgttcatgtgcgccgatgaaactcggcgctgacaacaccacgttctcggggaatgctgcgatgatcggtggttcgatatacagaccgttttggaataggacgatcgttgtatgacctggagttatggctggagctatgatcttgggggtgttgttcacttcggggatgttcttcatcgtgacgatcacatagtcgaatggggcgttgggatcacccaagggaaccgcgttgacgactatctatgtgttagcttcgactggaccgggcaagctatttctcgcctcgcgactttgcgaggatacatacttgcgcttggtctccaggctgatagttttccgtggtcgatagactcgatttcgaatccatgcttgacgacttgttcatagttggaacgaagaacagacgtgacagatgcctgaccggatctttcgagggcgacgctgaccatcgtccccacaccacctgatccaatcaccaacactcggcgctttgccgtggtagtatcggacatgtttgatgattactcttgaggagacagtgtcgagaatttccagtcgatctgctacagagttaagataaaatgggacatttctccaaatacaacaccccaccgaggccgatttatgcaatgcgggaggccgatctcggggcatttgattatctcggcatctcctgatcttatcgacattctaccgctcactggatgacaaggccgagctcccttcatggcccgatttggttattctgtgacatttgaaatgagggataaactatacaagctaatgttccaccatggaacgcgcaaaccatattcgcagcaactgatcggatgataaaaagtgatgtgaaatgtcgaatctttcaaaccaccgccaattatcttccatgtatccccaaagcaacccgagatgaagaacctagtcaagcaaatccgattccccgcgctcgaggacatcctcagcttcgcacaaaatgtcgcagaaacctcgggccgatgggtcaactggcagatcatacggggcatgcgacatgtatggtgggagacggactgggacgtgctatcccgatgggcgcaatcgatcatcgaaacagaagagcgcctgcgcgaaatcacccaacgcgagacgttcgtcaagaagaatatccatagattccacaacggctccgacgaagcagccaaattggttctgccggatttcatcgaagagctgatcgctctggaccacgagtacacgcgcctcgagcggatatacgataccctcctagcgggctgtcccgtgggccctatcaagagcggatatctgtggattcgaaagcagccgcagtggcatctcaggaatgagtggttgcgccaggattgtgcgaggcgcggtgggtgctgtggtcgtcagtgcaaatgttgtgagaaaccgcccgatccgatgaggaagaagggctggggtcattgtacggcgaagtgtgcttgttgtaatgatgtgcttgaggacggatttcgactgaccgagagaaatcggagaacattgcagccggagtttgatcttactgtttacccgtggagtgattatagtcgagagatgtttcgtgcttatatctggtcgcttgaataggctttctaatagtttgctttgaaagggtgttgcttgaatgtccgttgctctgtataatcaaatgccgctttcctcttatcaatgtcctagaatagaactagcattttgcaggggttcgagacttagcttgaaacaaaagtcgaagataccatacctagagttgcaggtccatgcgaatcaaagataatcaaatgatcagcggggaagcttcctaaaatctcgccaagccggcatgtttaacgcatcctgattcgaccgagtagttaatatcagagccacttggagagtacactgggagtttccccgcagatgatattcacacttgataaggcggatctgcgtaagtgtaaggcactgattgcttaaataggcaggatcaccttgcccatcatgctcgctcaagtatcctttcctacagtatccaactctcaactatggagagtgacagtattcaggatgagaccatttgggctccaggaacagtcaggctagaagatagtaagtgaccgccaaccataccgatacaacttgacttacagagccagtccaccaatccagagaccaactggtactattccccacgccatcagccgaccccaacgatcctcttaattggtcgacagctcgcaaagccctcaacttcaccctagtaagcttctttgtgctatggacttttgtccaactcgatatcggcttcacagcatggggcccaatgcaagacgagctcaacttctcagtcgatctactaaacgccaacgcagcggtcaattacggcggtcttgctataggctgcatattctttatgcccctggtccacaagtacggccgacgcccaatctacatattcagcgtggccttacaactcgcatcatccatctggcaagccgagatgtacacgatcggcgatctaatgggtagcggcctgatatccggcatcggcggcgcaatcagcgagatcgttgtgcagattaccatcgcggacatgttcttcgtgcaccagcacgccactatgaacggctggtatgtcgtcgtccagtgtgcaggagcattccttggccccgtggcatcggggtacatcgtggtggcacaagggtggaggtggatgtggtggtggtgtgtcattttcttcggtgtcacactcctctgtgtggtattccttttcgaggaatcgaaatatgtcccttatttggatggtcgggagtttaccgcggatgtacaagtgaccgatgaaccgtccaaatcacgcaaagatagggacgcagcagatgcaaagagcgccaatgagacgatcgctagccccgtacataccaacccggatattccgatgaagacgtattttcagcggatggctttggtgaccatcaccaacgaagctctgtggccgcatttttatcaaccaatcgtggcgctctttaccttcccggccgtttcatatgcagctatcacatacggatctatgctgagctggttcgcgatcatgacttccttacaggcatcgtacatgatcataccgccttataacttcgatgccattggcgttgggctgatgaatgtggctccatttgttggcgctcttctaggtttcccctttggtggacatttaagcgataaatctattttatggttatccaaacgcaatggcggtatttacgaaccggagatgcgtctttggcttgctctacctcttgccattattggccccgcggggatactaatgttcggtttgggccttgcctatgtgagtatatccaaagcatgccgtttgaacattctaacgttatctagggtgtgcactgggctcttcttgccgtgggatttggattctttggatttacacttgcttcaattagcggtatcaccctctcgtatctcatggattgctatcaagacgtgagtactgatcttatttcgagcgtttgggtcctcttctaatttgagcgcttctagatcattagcgacgcattagtcggagtgatttttatgcgaaatatcttctcggtggttgtactctttgctttgacaccttgggtcgaagggatgggcttgcgagacttgcatattctgcttgcagttattgcattggtggtcctgttgattcctgttccacttcttgtctggggtaagaaggctagaattgctacggccgcgagttataggaaaatggcggcaaatcagctcagccaccggactacttagataccctcctactactagaataaattgcgactcggctttcagttgaaggagacgaccttgacaaatattaagtaatgttataatttagacaagcccataaaaataagactaaaggtgtataatgttaatgaaggtatcacaaagaagaatgtaaacgagtgtttcaatgtgttcctgtttcgcctgactcccccaccctatgcaatccgcatagagccttccatccagcgaaggagtcccagacctagacgctttccctcggcttctcatccttgtagtcttcatatcgaggcatctcaaatgtttgccgaaccgcataggagacactttgcttatggttggaagtgatagtgcctccaggattgctcgagaccacaagagtcctgtcggacagctcggatacgttgttggaggcacgaatttgagaccagaagttgcgatgactcaacttgaacaaagggcggaggttggggagacaagcagccgtgattccgactgctgcttcgatacaggtccacacgatgacgggaacttggttatctgaacatgtggttagagatatggatcgagagattgaaagaatattggcacggtcgatactcacaggtaatatcaggacctagctcaaccagtcggatcatggcattgaggcggaagatatcgaaaatcaaggttctagacatgaattgttagtattctttcactgtagcgcgaatgggatatcaaacatacaagccaccgacgaggaatactccagagagaagcgctttctggccgtttgagatcggtaatgtccacacgactctcatgggcatgatcaagagaatgatgtcggagaggatgttggggatttggattccatagtagaattttgctgggtcaaggcaggctccttcaaccgactggtcccagaaccttttgacggggatacacagaagagcacctgcaacgtaaacacccacaacccagagagtgacgaatccaaacatgatgttcactgcaattgtcatgtgtcggactgcaaagagtcgcctgtacagtgccagaatggagtatttaatgaaggcgatgcagccggtgtagataaaggcattggcaaagccgagctatcttgagtcaatgcgtgtacttgatagtaatagggctgagttacgtacttggaagtaaaccacgaggtttttcgctgggatcattgtgatgtgtgaccccattccattgaacaggactaatatggtattagtatacgttggtttaatggggattttgattcactcacgaacgacgactccactggagcatgcatatttaaagaacagagcaaccataatcaagtagtcgtccatgaaaagcctactcccagtcaccttcctcgccaggatcctgagagcaacggagagagtcgacaacgtgtaagcaaacaccagggcaataatcatcgaccggcgtaactcctggttcgggtgttcgaagtctcctggtgtccacgtggggctggaggaatctggggaagacatgacaggcaggtatggtggatcaactcaaacaacaaggtaagattaaacgagaggaagttgttggcttgaatgatttggaatcatttaaggctgcgtttcggttcctttaatatacttcgacaagatgaggaaggggaaaagggatctacgtatgtagcctggatatgtcatatcttttgacatccacgaaaataccgcaaagatgatatgaagggtataccgatcacatcgatgacagggtatttgctaggtacggaaggcagttcagctcaggcaccctccaatgcgaacgactactgattgtagtgtgcgactattttgccttagaaaaagctagccgatgttaatcaacggcccgtcggatcataaagcaacaaagcattgtataccttggccgtggagatttcaccaatcatatggaggccaaagaaccctttccggacgtatcatcttggaagagtggatatatcagattcggatctgacactcatgagatccactttatgcaagttatttttttccgaaagcccggcgaatagatgtgttgaacaaaatgacagcatgttctagcgcattacgtctttgatcgagataatcactagagatatgcgtgaagaatgattgttcattgctttgcagtcaagttctcatactagaagattactcaacgaagttcggaattcatcactatatttcaagcaagggattaacaataaagaagtctacgcagttttgagatatagataaaccggggctgagtttcccagggctctatcgtaggagaattcagaaatagagacatacacggaatatctggctttctccatatgtaccacgcccaatgtagccaaaaacgccgaaaccgccatgatcgtccaataattgaaaacaatgcgggttgggccatagaatacagatttgaagccaccgttttggcagatccacgtataatgagacagttgaggtctggggttgacccgatatgatatgtctaaagcacagcagacatatccgattgcggcccacatggtggcatttagtggaattcagccgttatgttggtccacatgacagcgcttttgccattgattacgaagttgatatacgtctcatgcagctattgcactgccgttgcacttcgattgcacatctgtacccgcttttcctggactgtcgcacatgaatacgatgttaaatgcgatctcaattggaatttaatacgttgttcatgcacagttttgtgcaacatatgttgtacagcctgattgtcgatggaagatgttatgaatccactttttactccgcacagatatccccgatcttcgcgaggggctgtatcggagattagcccgatcgaacgtccgactcttcacagagctgagagcatgtcattggaaggtccacatgggtatattacgtcttcatagtttatgttcacccttgccgttctgtggctcaatgtcctcgacaaagttcgacggaaagtctaacatcccggatttgcaatgcctcaaatttatatatactttgatcgtcccggctgactctaggaagcaggtataatccaaaacagttagcatattccaagctatccacactacgagcaaggcacatacccatagtaacacgtagggccattccattgaacagcacacgagggaaagtcgcacacatatttgtagctgccgtggtccagattctgacctgcagctttattatccgcaagggtgacgacactatcaatgtttcagagccgcaatgtgtctttccagggttgcacctttccatgactcgggaagatccctgtcccacaaccctttctagtggtatcattggatgctgaggcaatgtttgctgcgtctggctccactacggggctacggtaaagtgattacccttccggtccaattgttgacgccgatagcaatcgacttgggcatggacccttccaataaacagacgcgatgctttagatgcacgccatcgacgattagcgtcaagccgcaggatcgatcgaagaaatgcccctcaccagaaatattccatctccgaagctctcccactaaaatatcgttattctagtacaaatcctacgcgatcatggccaaagtcgctcttattaccggcggtagtatgtagctttctatcctcggatcattcattcactaagtttattgaaaaaagctagcggaatggggcttgcagttgccaaggacctgagccagaccggcagctggcaggtcaacattatcggcaccaaccaggagcgaggccaagaagcagcagcttccttgttaaatgtcacattctaccaagccgacgtgcgcaattaccaacaactagccgctgtatttgaccagatcttcaatgccactgaccgaatagactttgtcttcgcgaacgccggaagagcagattataccgatttcttcgctaaatccgagaccggcatcccgcccgaaccgggttctgaacttgtcgatgtcaacgtgaacggcgctctatataccagttaccttgcgatgcactatttccgtcgctctccagagttaacgaaagggcataggaatttaatactcatgtcgagtatcgggggactgtacccctgcatgttgaccccggtgtactctagcactaaacgtatgttgagaattaacaactcgaataagttcgccatcagacatggctaataagttcctagatgcgctcattgggctcactcgctctgtcggagagcgactttgggaagatggaattcgggttaatgctctgtgtcccggggtggtggaaacgccccttcttgccaacgaggcgtttaatgcgatcttcccgcgggaaatactcattcctatagacgttgtaactggtgtggtatcagagctactgtctggggcagatatggtagacgccaaagggatgcgtgtcgctggtgatgaaatgcattcccgggcgcttcatgtttcaggaaagagcttccttttcattgagaagcccgagtttcatgatgcgcagtctcggataacttgggctgcaatgatggggcataaataattggaagcataaatgtacgagacccaatgaactcgagataaggtcccaagactgtatgtcgccgttttaacatttgatcgctctatatcctgcctatctggttccacagaattcacgttcaacactcggaatgttgaaacacctgatgcacatgtttaaactcaatttccttgcaaatccctggcaggtagaagatcccccatgccataagaacaactgccgtctgatagtagtcaaatgcataactgggccactcattgactgccaaaaatccatcggatcccatcccaagctgtgtcagtcgcatcaaattgcgaccaatagcaataatcgagattgcaagaccaaacaactgattataaagtttccaatgaggcatcatgagttggatattggcgaacgagggtcgtccaaatcgaacagtccagaatatattctccacaagagtgaatatccaaaaaaccatctggcatacataactcgccgtgagaatattcgctgcagactcaatgagtgtagccttatgggtcagagcaagaatcatagcaccggtgccctgaagtagaaaaaggacaatgttggaagcgaggtagatagggagtcgtaattgggtagggagcagacccagattctcggacttcaaacagcgcatcattttcacttgtgtgagattgacggtaaacatgcatagcgttggtccaaggaggagaaacagattttgaacgccgtaggctccaaagctataggcatcttctgaggagaacactcgagcccctagacccattgcttgcactatggagtggtgagcgggagaatatctcaatcgggctgggttgttccttacccagagctgctaccagcatatagctaccatcccatgctcgagagcgacacatacggaccgcatgcgttgcaaacagggcgcaatatatacccactccaacaaccgcaggaatcagacttggcgtataggaataataggcggttgaagacatcatattaggaaggatatatcaaacaaagaccaattggctcttgaagatgtaagtaagttgtaatgaaagcgagcatcactgaaaaatccggaacccccatggcatttataacattggaccccgagtaggggaccaccaactcgatgcagatcagatctaaaccgagtaatcataacatagctctttatggcagcctaggggcccttgtgaaagattatttctacgacgtgcaatgtctcggcgaagggtcgggttcgtactcgggttcggaaaggaaaggttaatctaccttatttcctggcatttctcaaggcaggtacattatagttggggctaatctattctcaattgtgaaggcaccaatcaaacctatcctttttgctactcttttctaaaagaggactacccagtatgttagcgtctcaaattagtgacatactcattcttcagtaatattgaagatcaagctgtttaggcatgagatgatcacctccttccaattaaaatatactataagacaataattaagacacgctcctgtcgtgcagcgaagaaaaaaattgagatcaatctcagcagttcaaatcatccgccatgcgcctccaaacagatttaggcagcctcccatgaatccaataaccaccatcattcccatcctgaccccgccctttccacgtcacaaccaaatcatccaagtgagtcttggtctgtcgcagaagtccgcagtagtcaacacttccctgtacaaagagcggacactcgccttcgatatcgagaccatagagcggtaggcttttccaagaagcgatgcgtggttgagccgcgcggctgccgtatgattttgggaccatgggtcttttcgtcgggtttttgtgctgagcgattatctctgcgatgcattctgattgctgcccttcgtgaaccgcacgccgaatgtgtgttgccagtcgaaccaatgaaggagagtcatattcgcttgttggtattggatccggcaggggcatcatgtaccaggggttggaaagatttgcctctgactggagttgttttgagatatcgatggttaagccgaagttgtgggcagtgtgtaagtgtaaagaagcctgtgcaggtattgtcttagtgaacttctccaatttggggcaaactgtatgacaggtagcatcactaaccttgtagataaaagccagcaagagatcatgttcagttaccttggcctgtttactttcggccgcttcaatccatctctggatttgccctcgggggaccaacaaggtcttgccgatccgtctcgctgaggggtagcatatatttcgcccaatctgtttcccgagggccgtaattcctgctatccaagtccgattcatggaatatttgtgcagatctgcgatccgatgacactcaatcttctccacgcatttttcgattacttctgttttcagcggcaagagtggtcgggcatggagactgtgggtaattttttctcccctgagcaggctacaataagcctgaactatttgatgagcacctataagcacctgtcagctctactggtttgtgctttatgctttctaaggcgtcaattaccatttgcatcgcaaagaggctgcaggaacttgaatcctattatgcaggcatcggtcaagaacaccgttcgtatggagaatacgcgctgcctccatgcatgcaagactccatacccaaaatctaacgccttatcgaatgcctcggagtcaatcaattgcggtgagtccggcttgggggaaacttggagaatctcgctgagctcttgcttaagaattttccctttccacacttcggctaggtcaccggggtctttcggatccaagaatttcgttttctgtttagtgttagtatgattaacgaccgtggttgacgttaccaagcacgtaccagcggatccattcgcaagttcagtacaggccattgtgacacgagtgtatcggcggcgaactgaaagtcgagcgggctaggactggtcctcacaacgattgacagagtgaactcgagaggtcgggcatagcccatatccagtggacttggcttcataatgaaatttacaaaaaaataacaaaataacacgagatccagtaaccatgcttatcaagccgacccaaaggttatattaataataaatagagacagagtgaggccgtcacggaaatcaacatgtcagtatctgcatattgatctgttgaccccaactttaacgtctctccccacataattgccctctggaatgccaccctgtggatctcctccaatgagcttcctgacatggaattctgcaccatggtagagacctctctggaatgttgtatgtccccacacagacctgcgtgtcgctcacaattgcccaaacttagcagcagtcttgttagaggagattggaaatgcgcgggcaggttgtccaccaatcgtagtcgaaggttgcagaaatattgactcctgtcattccctatacgaattccagctaatatcaagtatgatgttggttgtgatgaatcgattgtctgatactatcccgtgatgatggataccgggatcagccgagccactagccggccgttacatttttttacaaagttacagaccattttagtgtgtaacctttgtaataaatgtaacaaaccggttaaatcgtgactagcgtacggcggtcgaaaccgactctcctggcaacttcgaacatgcttgaaagttgacacctttggcacctctgaatggcttctctatctctgcctccacctggttttgacgtcggtattgaccggttttccagccttcctgtcgagcttctcatttgcatttcctcttacttgaccaatcgcgatctcaagtctctacgcttggcatgtagactcttggctcaagtcgctcatatccgtgtgaatcgtgtttttctctccgccaacccatgcaacatcagagtcttccgcacaatcgcagacgacgaagagttccggcatcatgtcaccgagatcgtatgggatgatgctcgttttatcgagggcccaaagccgcatccccaccccacaggggagattgatgaggcagacatagaccctgaccaaggatgcccctactggtttgtcgcggcatgtaaagagaacatacatgaccgaaatgtgcggaagacctacgacatagtgcggccagatgacgtcgcacggggaaaacaagttattacgcaactatcgctgaaaagctgctggcaattttaccagaatttgctccagcagcagaaagacgttcttttctcaaacagcgatgtagacgcgtttatctacggaatcgggcgattcccaaaattgaaacgaatcaccatcactcccgcagcgcacgggtggatccatgccccattatatgatacccctatgattaagtcctttccgtgtggatttaactacccgattccacggggatggccgacgtcgagagattcgcagattccgctacacgcccatccatggagagaagccactgaggaccggaagaaccaatggcgtgcattccgaaacgtggtatctgtgctcgcaaaaaataagctctatgtcccagaattggttcttgctgtcaatcagcttccgactgggcttaactgtactatctttgatcagccatgcgaggaatacgacaacctccttacaatactgcggagccctggattttgtcgtctagatcttccacttcttgtgggtgggcaagagcacgaagactggctctcattccggagcggttatcttaagcacgctttgtccgaggcaaagaatatgaagtacttcagtcttagaacaacagttgacaccgatgccatacgtgacatctcgggcaatcccacccacttcatcccactaaagactatcctccctgtggaggagtggccagaactccgttccttcagattatcgggtttcctagtgaagcagggtgacatgataaatttcctcgctggactgccgaagaccacatgtgttatcgaattgagtttccttgaattccttgatggttgctggcatggtctgctcactgaaatacgtgacacattatgttgggaccagcgagacaaggaatcaaggcccaaactcattattggtatagcggactcgatgcgcagggcaggatttggcatctggctcgacaacgaggtgcaagactttatttatggagatggaccgaaccctttttatcccaactatggcgactacctaggagcaggaagagtgggaacctgccgggatacatttgagccggggcgtccgcggcgtaatgtggatcgttttactatagctcggatggggtacttcatggcagagccgttcgctgacatgttgtagtatgtaactaactatagtctgctccatcgtaccttcgaacacatacacatcgttcggatccatatacaatgaacgtggcattgggaagaaactaactgataaaccgcttggtagaactatggatagaagaagttgtaaactgataggatttagactgtttctgccataagcagcagatgtgaccgcaatccgttcaacacaatctcgacctagaacttggtcctacgacatttgtgaaattgcgagaattgctaaggacaaggacaaattcttgactccccttgaacaccttgaaccttgagaacagaaccacttggcgaaatccagaaagcccagaaaacactaaagcactattgaccagccagcctctttcatacgtctcacgcgaaatttctcgcacgactcttttgtcgcgcgctttaggttctatatgactgatgaccaaccctctactcaatctctaccgtcaaacactattgagaccaaagcagcaaggtcctcgccaagggcctcgaaaccgaaaccccaaagggacagcagcggaggtggtgtgcggagaagtacgcggctgcaacaacgcgataaacaaaccaggcggtagttgggaacaggcccggttaacgaccgaggagacgactgcctgggactgcgactaggattctcctaatctccaccaaatggctcggtcgttcaagattattcgtactttgtttgcattctcgcaggagcggaccgttgggactgcaaagaggctaggcgttgaggagaatgagagatttttttttttgctgatcggtcgaagctttactctctgcgggtggctaagaagaaatatatggcctttttgctctgttattccggtagggaaagcctatagcgcacctagataagaggtttcaacatgaatgacacctgttgctaggagtgtagagcatagtaccgtgagcgacggaatcgttaataagtttgcttgttggaggcaaagattgacgagtgcttaatgacggaagttcatttgtgtcctttgcgaatcaaactgacggaggtatttggtgaaacttggaagtaaacaaaacgacataataaacaaaacaaacaatggcaagataacaaaacgcgaatcatatatgctcatacagaggcttcgaaacgtatatataaccatcaaacgttcccatcttgaggtagacctttctccgtcatcagcttattcagtgttgcggcatcaatccgctcatccatgtccgggtccagtagatcttgaacgatataactaagcgactcatcttgctgatctagctttagccgagcagccttgaccaggtcaatccactggagcatcgtatcgacagctttcatatggggtgactgatgtatgttcgtaatcaaccaatgcggtgttttctcaggcaagggaatgtggcctaatagccagagtatgacaatacccaaggcccacatgtcggatggcggtccacgtagcttccagtctagcaaaaactctggtggcagataccacggcgagccaccaccgggcgaaggattgccatcccagaagctgaggccgaaatcgatcaaaatggcaccccgatcagggctgtagaggatattgcctggcttaacatcgttgtgaacaattttattgccatggataaaagtaagtgccgaggccatatcagccaggatcttctgcgcatctgaggaatctccgatgaaaatgccactggcttgatgccgctgacaccagagtgattcggcttcgacgtgctcagtatatatactgtggaaccgggcgtcagatccgagcatgcgaagtatagccgactagtgagcagatcagttctgggaccaaatgaatggaacgaaagtacatacatgacttttgagagaagagtggatcgccgattcatgtatccaagattcagcagcccggattgcgtccctctcgtttctgccggtggttttgattactttgacaaccatgagcttgcctggcatacccgagtgctctgcctgccatacagacgaatttgcctgctctacaatagtcctgcatcgcgtgagccgatacccttcgtcgccagctccgacaaacatagtatcgccttttgcaagcttcacaagtgcgttaccagctgaaacaccctgcataccacgcgaaggctcaatcgctcggtatgtggattctctcgatttcaccctctttgacggtggaaagtcggatcctggcgcaggtcgtttagtggccgttttagcagttatctcccatgaagtccgcgggagtatctggaattcgacgagagttatgccattgatctcgatagcacaggaacctttgtataaaaaggcagggtctctcggcaaaactttcatagattccttatcaagccgcacgtcgagggtttcgaaaggacaggcattgtggagaatgagacgatcctcgcctggatccaagtacaagtgaaatctcatatcatgatgggtaagggtgcacccgacttgctcggcgttcggagccacaacgaggaccctggctgactcgcttttctctggacagtcacccagttggacttcgacccagttgtcatagcgcccggctcctttgtagggagatatatcgagctcaatgaccctgggatatagaataattctagctgtcggttcgttggacgtgatcgagtccagacgtagcatgctgaaatccaagtccatggattggtttcggcttgtttctagataaggataaggaggcgagaatgtctgggttggttctgtcaagctgggatgaactctcgttgagctagggccagcctctgtcgagatgggaccaaccgtcgatctaggatcaacttcagtcaaaggcaacgtagccacttcatcctctctgggctcctcagtgtcctcactttggcctgtctggccaagcttccgtttagacttggaattgagtgccattccgggaccgagaagctgctcgtaagcagagtatagaagtttgccatattattcgtattaccctctgatatatgtatgccgtgatttgcaacagaaccgaagcgccggcggagcgcccacggaaataaaccaggcacatatgcatgcacaatccaacttgccgctaggtatagtagaccgagattgagggcctatagactaaatatagccgtgcatggccatgtcagcactaagcttgagcgtcttagattggccgaagcccatggctgaggcgccaaactggtttcgagtataaatagaatgtcatttgattctgcaatgttaattcgatcgagtccaggcggtgagtacgttgttctccgcccttttagtgtggggcccctgggagggaatggggggcttgcccatatcataacataaatcagtaactatagcaagagatattatctttactacctcctccatggctaagcggtggcatcggacaatagacactcatctgggggctcatactcctcctgacccaaattattacgaaaaaacgtggtgctgggagtcctcgagagtcggctacaaggatcccaacgttctttttaccacactacatgaggaatacaacactctaaagtgcgcgattcaagacccggaggcttggcatcgcgacgtctcttgcattgcgagggcttcgaataacaacgatgaattcctaactctgcttaaacagcgacaagcagagaggtttcacgagatccagacaacctggcaaaagatcaaaacacggttaattacggatcctgcacgttgggacaacccgccaaccaaagctgttttatggagcaattttctacaatttgctcgaaatttttcatacgattgcctcgtcacctgctttggcgcctacgcgactgatgcccaaccctctgctcaacctctgctatcaaattccattgaggtccacccttctaaagtgcaaaagctcaaaagagaaccaaaagagaaaatggcagcatcctctggcgtgaccaagtcctcgccaaaagcctcgaaatcgagaccgaaatcgagaccgaaacgggacggcagcagacaggacggtgtgcggagaagtactcggttacaacaacgcgctgaacaatccaagcgacagtgtgcaggacgcacctctcttgaggaaaaactgaacaaggctgaaagaagatttgcttcattgcagcctggaattgtggactaaggccactgttcccagggaatctctcccctcccattgcattgggtgatacatagtcctctctagtatgcccggtcttggctgctatgcatcggatatgcccagtaggatgggactggttcttttgtttctgccttggccattatatacgtttacactgtgtccattccaagcatgtgtactttgattactttgaactatcagacctgttggcgtaatgattctcttgacaaacagcacagattgactccgctaaatgaatttggttttataacaattcttggtttataggcatctaatgacatagatcaatgtgataagtggtgcagtcatctcgtaccagtctgatgatattaaggtaatcaggctactcggcgtaaaaataagatattctgacttcatttaagccgtttaaccctccagactggcaaagaccgaggatcgagataatatagatctaaccatggaacccacagacttagcgccctgtgcacggaccactcgatcgaccgcgggggaaaataaattcttctccgccaccaactcacaggcccaaccaattcatcatggcaccgacggcgtgtttcaactgcaaagaggcgcgagccgtcatcatccggcctaagaataggcacaaactctgccgtgcgtgtttcatcgatattttcgagaccgaggtacacgaaaccatcatcggcaccaatctcttcttccccggcgagcgagtagcgatcggggccagcggcggcaaagacagcacagtacttgcagcagtactaaaaaccctcaacgagcgatataactacgggctagacctatgcctactgtcaatcgacgagggcatccgtggttatcgcgatgacagtctcgagaccgtgaagcgcaacgccgtgcaatacgagatgccacttgatatccttggatacagcgaactctacggctggacgatggaccaggtcgtggaacaagtgggcaagaaggggaactgcacgtactgcggtgtgttccggcggcaggcgctcgaccgaggcgccgcccgcttgggcatcaagcacgttgtcacaggccataatgcggatgatgttgctgagactgttatgatgaatctcctgcgtggtgatctaccccgtctgtcgcgcggtactagtatcgtcaccagctccgacgcttcggatatcaagcgcagcaagcctctcaagtacgcttacgaaaaggagatcgtcctctacgcccaccaccgccagctcgactacttcactactgaatgtatctattcgccggaggcattccgcggcagtgctcgtaccctgatcaaggatcttgagaagattcgtcccagttcgatcctcgatatcgttaagagtggcgaggacatggccgcgcttgtgccggtggaagtccggggtgtgggcaaatccaagcagggtgaggaggaatcagctggtggatgtggtagtcaaaatggccgaaccagcggaggagagatggctgcaatggagaaggagctcgctgagaacgacacagccgagtcgctggagactgaaatcaagattcctaacggttcacgcgtgaaggcgaatcgcgggccgacgggtaaggcggtcaaggtgcagactatcaaacactgtgagcgctgtaactacatttctagtcagcggatttgcaaagcgtgcacgctgctagatggtctcaaccggaatcgacccaagactgcgatcgaagttggtgttggcatggaagacgaagaaagcagttctactttgatgagacaaatggagcgcgcccagctcagcgctacctgaagagtcactcagggaagcatgtttattcaaaccaaccttctgcaccagctttttcggggttctagggcatctccgccatgacccttttgctaggctgtcacctctgcaacacaatcacacccagtgtcaacatcaggtgtccattctcggtgccctaaacactgtgcggcaacccacatggttcgcaatgaacaagttttcaggtcaggaggatcattagataccccaagttacgactgaaacatccaaagtcaatgcataacatagagaaggttttaaaaaacaacaagttctgctacttggcaatgctctctattttattttatacatgaacaatagtatacaaatcccaaaaatcaacaacaacaacgccattccatggacacatacatcccagcgaaatcacactatcttcacaaactttcaaccaagcctagcacaactcgcctcttgcgtagcatcagaatgcagatcatgtccacaatcgacttgtcaccaacagaacaagctaaaccaaggcgaacccaggcaatccctccaaaactcaaccagactcacttctcctcaggaacatgcaagtcaggcaactcaaacccaacccgtctagccgtaagacgaatcttctcctcctcatccatagccgcaccagggttatagcgctcgacgagctcagagtagacgcgctgggcgcgggcatactgagcgagctggtctgcttcttggacgcggatgagccgttcctcgtctgttgttgggattgagaaggtgaggacattggatttcaattctggttggaatgaggataccgatggacttgagcggaagatcgcacgtagttgttggtggagtggggagggggttgagaggctgcggcgtgggagttcgcggaggagggcgcggtaggttgtgcgcattggtgttgtagacattttgagtgaggtttgtggtcggtttagtgggttttattaaagtgtatcaagactctggtgcaccggggtattggaggtgagtttggcttgggtcttgaagatgatcggatggatacataactagagaagacctcgggacaaattaagcattttcccgcctttttctgccgtctgctttaatccacgaacaatagggctttgagccactccctgcgttcttcatcattcctggcttcacggtccaagaacctcttcaccccctcgtctagctctctcctggatttttcataatctacatcgctaaccctaccaccccaatgcttgaaacagccagtgtcgtcaacgaatgcattcatgagttcaacaccttgggcccacagctcgccaccctgctcctgctgctggatttcttcgtccgagaactgtagcgggaatggcgttccaggagatctgccatcccgtccagcgccaataatatgtgcccattccttctcgacatctctcagcaggctgttgaggagcggctggtagtccattaaaactaatcccggaaccacaataacctgatgccggagagtattctggtcttgtatcgcttgaaagaccgtttcgttgagctgaagacaccgaactagacagagattgtgcagtgtctgtgctctatggagtgcttttgccttccgctgttcatctagatccatagagtcaacggtgggaaagcgaccttccccaaatcttcaggaactgggccgttgtaatcgagaaatgctgggcgcccaacctgcgtaaaaagcggacatgcgctaacggactgccagtcgataattcccacgatacggcttgggtctgccgggtcgacaaatatattctgagcatggagatcgccgtgccataaaaccgaggcgtgggtggctttgttttctgggagaacataaggtgccaccttaaggtagttttgcaacgaggggagctttttggagaggctaggctggtattgtccgggtccagagaaaagaccttcgggcattaagggataccgaagacctgcctttgcagttgcaatttccctctgcgcaatagccatcataaatcttatgactgttgaccctaaattttgtgcatggataagcacaagatagtaacatcatacgagtcggagatgaacttacatggaccacgctcaatatccaactcgcctctcccgaagtcaaagaaagaacggtgattagtcggtccaatggtaaacgttttgcttcgcacttcgttcccagttgaatcaaggtataggggcgatgtagaatcggaattgtcaggaaggtcatctttatagtacaacgacccgaacttggagaattttgtagctgccagtcgcctttcaatatcaacaagctggtccagtatttagactttctgcttttctttgacggtgtcccatacatcgttaagtaccacgccggactgcttctccatgatgatgtactctgccccgagagggttctctggtgctcgagaactccatgcgtacactctcggaacaggaaggttcagaaagttcctcagctaaccaagttagtatctaggcgcaaataaaaattgcagtaggaaaaaaagcaagccatacgaaatccatagttgcaacctcactagctgtcgtgaagtgtggtctgcctgcattgggatttggaagtttcgcaataatgtcgcgtctatcgtctatggtaagctgaaacaatttgttatattggccctcggagatctttaacacgtgagtgcatgctttcgatccgaccgcagaggcagctactttcagaagcgttgagtggtcgaatttgacatgacgacaggcaagctgctgtcgctcgttccaaagccaacgacctgaggtaaaccgattgagcgcctcaaggccatgcattgaatctgtgatactctcggtctcattcattttggaattgccagaaaaaaagaagccgccatgagtagtgcatcgtgggggttacagcgggaaagcgtggctgctagagttcttctcaggaaggggcctcggatagccttcatatctagcgttgcataaaggtagagagatctgtcatttcgctgtctataaagaaacagcgtgttgtgaatcccggttgtaggggctggacagaaggcgggtggtgacctgagccgattcgtcttagctgtctctacaatcgccacgacaccagccactaccattcttccacacgtaacctaattcctttctttcgcgttgagctggactagcgtaattgatatggcgccattaatatacacagctgccactgaaagtatcttggttctgttggtcggaacgaaaatgacccgaacatagtttccgaccactttcctcgatggtagtttcgccagtgtgttcttgcgaacataaggggtgctggaaacagacctttttactgcccaaggagtggaagaaaggtataaaaagagaaaagagaatcaagctaagaataactccaaatcgacacgattcgaacgtcattgagatacataaacatgtcaatatataccggggtaggaatatcctatctgcaaaacagtcaatggccatcactacccgcacctcagcatgcatatgtacaaaatgtcgtagcagaacattttttttcgcaagatgtatcaccgttacaagcgtcatatcgacccccgcagggaatcgagttcataacgaaaagcaggtaaaagacaacaacagtatttatcaatcatataggggcatagcgacatgagaaaggaggagtaggagaaggtagggtatggaggatagatagggaggcaggggtgaagatgttggatgagatggttgtgagggattggttgagggagcagcttcaattcgtgttgaggctgacggagacaagtgtggctgaacaagcgactgggttcaagagcgcaaccagccaaacttccttcgtccctcagctcccgtggacggttcgacgtgcaaactacgagcatacaagtcctagacaacgttaatgggaagaaaaaagattcatggtaataaaaatcttacctcctcgtctccggagagcttcgaatccaggatcaatcgctcgatttcgtcggacttctgagcctggggatgaggggtcttctggcttcgttgaattccgagaacaacctcacccatgacctcgaacttcttccagttaatgcgagatttgttctcgccgaagaatgtcttgttgccttcttcagcagaaacaaggtcgcgacggtggaggggtaggaatgggattcgctccgagaacgaattttcccaggctaggcggtaggcaaagtggcttcgttgggtgctcatgaggatgaccagacgcataaactccttctgagctgggatagggatcaggtctcgagtttgcgtgaggcggtggacgggagtgccgttgatggcggcgatgaccgcacccaaggagttgtagttgttttggcggcggagtttctggcaagaagtgttagttgctgctgacctataatagctggattgagaaaacctaccaccgcgatgttcatgaacttctctagcgcctgcgctctatgcttaggcttatcgcgtaagaggatcaggctggctacaaagaaggccagatgattgaattgcttgatcatccgattaacgttcgtcaagctcttgaccttatccttgtctatgcccgaaaggctgacatgacgcacaagatcacgcggccggaatgaattgtacatgatccagtcaacccgcgtcagttctcgtgcgaattcctcttctggggtgtccatgaaaatccgccattggagtttgccaagtgaagtcttatgtgtcagttcaagacgcaaagcctctttttgagctgcctcgaggctcaataatgtgaatgactggctgatggtactgttcgatttgtcggtattcgaggagactgaaagagttcccgagagtcgcgatgtcgagtcatgcggcccactactgagatccagcgcactcatactatatatggggtcttgctcttcttcggtgtcgtaggtgttagtgccagagccagcgctagcgagagccgccgctggagaacttcggccggagttgtcgaagaatgtctcagccagttgggactcatcggaatcactgtcacccccaaatgcccatccaatatcatcatcttctgcattcgagtctaattgcgatccgatctccttggcagcgaacatgtagaaatggctcttttcgagtaaagcgacaaattcaatgatccgtttgtgaagtttgggatgggcgaaatctccaggataatccgaggcccattgagccatgacatcgagtaatcgcagctgatccgccatgcgggccagttgatcttcgttgctcagctcatttcgctcgaatcggctgatcaaggcacttaagagactagcgggagcagcaaactttcggtacagacataggaatgtagaacggaacttctggtcttgtttcgacatcggcaaggaaatcaaacgatcgactagctcatcgaacgatagacccgtctctgcactcgagttgctctcgctgctcggctttggccgcacgactgcgctagggctcgcgggccggctctgtccatcgtctccctcgtcatccatgttcaaaaaactgtcgaaagcgtccgatcctccactgtgtcgccaagcggtatgcaatcgttgctgacggttatcgtggttggtagagtgtagttcttgtaccgacggtctgcgggtatttaaacgcgctccggatggcggagtttgcggtcgcaccggttgcgagttcctgcgggcataacggtgggaattggacgtatgctgcaagtagtttccatcggttgcgagacggttctcaccatccccgtcgacacattgatcagaggctgtttgtgggccgccggcggctgtggacacggctgagagggtttccgagttggcacgagtatgatgccaatcgtgctgggaagagttgatttttgttgaagcaagagaaatattagaattattggagagatctagaagagaagagaggggttagttttttaggggaaaaccgaagacgagtttatggggaatgacaaaagtagcgaacgctcctgccgcgacccaccttggcccgctcccacttgggggggtcaaggcacacctggactcgacaatggttttgggtcggaaagaaagaaatcgaaaaagaaaaggtacaaggggtgggggaagagacgaaaattgcttaccttctcgagtagaaatcactgcccccaaaaccagcgctatgcacatgcgttgagatcgaggcgaggaaaacgacgttcgatagatctcgtaccggtcgtggatcgcatccacttcgatgtcttccaaaggttcggggttgacatcgcatttgcaggccacctgcaggaaaggaagatccgaggcggccaatgagtctaaaatccggggaaaatcagcctccccataccaggtacatccatcgagttcaggtcaaaacctaccaatgagcattgttgttaaagagagtcggtccggcttggtggcatcatggagaaccaaaaccccgtcaatgactggcgcagatgcgtcgcgccctgtacgcggccagatgatattcttgtcctcgtcgaattgaacgtgagtcaagtcgacttccatcagatgcacaatatagacagatccgtttaatgacattttcttcttgttcataggggaggtaggtgggtgcttcatatccagggcacatttgacaaagctggtcttgccggcgttttcttcgccggccactgcaatggtcacttctgggaagccgctcttgggatattcctatagaacagggggaaaggtaaccgtcagcaattgaagcaccgtagccataaacgactcagggtcctgggatcaattcaagacgtacccattcatgctgaccaaatcgtgtgcgcttgattgcgtcgcctgtaattggcgatgcctcctcctcctccagcaatgtgtgttcgaccttcgtccccgtgcccggtttccgcaccacgtcgagtttataaaggccccccggtggggctgaagaagtccggcttcccatgcctggtctttgggaagctgtagcgggcattcctcgagctttatcgctgtaagctctctcccggcgaggttgctgcgagatcatgacggaaacggtcggcaattcttgaggccacggaatggatcggtgtgacagcgctccaattactgtgtaagttcagagaacgagcactgcagcgcatccatcgttaggacagatcaggttcggttgagcagcgaggcagccatccgaggtgtgtgatcaaaattgctcggggagttgacttgaaaactaccctgattagccggagctgcgtcggatatcttggtcttggcagtaacggggaagataaagcaaacagataatatggacagatcacaaagattggggaacatgaaattggtttgaggtgcttttttcatgaaatggggttctgtcgtttcactggacgcccgagagatcttcgtgttcttgaaagcggctcagctaggtctcaaaatgggtggccacgagaaccgaggctgggtctaggacgatctcgcttagacaggtctacagagcgttgcgttatttctagacaaattggtattgattgactagggctgcagtagctgcagtagctgcattgactgccgtgtcatcccctgcccccggaaacaaaaggatttttgtctttgcagtcctacaagtaggtcatctacaaagtacagcttatacacctcatctgcccttgtcttgagattctccatgtgactagtcagaaacatgcagattcaagttttcgtactccgtacaatagtactttttccaccgaaatctcggtctttgaagttctaggccgtttgtgatatgctccgctttattgggcgctaaaagcgccgctaatcttacattatgtaggacttcggcttttagtcttggctcgcatggtagcgttgtatgtggtgtgatattgcactttaaaattatgagcgccataagctcggtgctcggtgctttcacccgtgcactggcaaagatgcttgctagcactaggagggagtagtatgcaatagagaaccatgtaaaaacccaagaaggccgaatattcataacttgcatgaggctgaatatggctgtagctgtcaaatctgacagctactctattggaaccgtgaaggtagataaaaagtcccaccatctcgtaaattcaatctgcatgtctcacttacgtgccgaccattcaactcgtaggcaatttttcccagaagaagatgtagatgactcaggctgattccttgcccttcttgacaagtgccataaactgcatgaaagcttcggcggtctggccagtctcagtcccttcctcgcaatcctgcctcagcttgcgaactctgcccaggccgcggttgaaccctttctcggacgtccatgggccacgactacgaggagctaacggcccacgacctcgcccgcggccacgcccacgtcctcgcgcgggagctgtgtaggattccacccattcttcctccaacgttgactggaacatatcttgtagctggctgcggagttcggggtgccgactgagaagctctttcatctctgacgatgcccccactgctgcgggggtcataacggcagcattggtgccagttggctctgtaggttcagggccgttggtatcgttctcgggtgtgggattgacatcgggcgctggggtgtcactcggttcctcgttcgatggtactttcggagcacagtatatcttatgtgactgggtgcatgcaagcgagcaactaaatcaatacctcttagcaactggtccacttatggataggatagaatcataatcgagtccgtacctcatcagtgcgcatgtgggacagcgatattttgagggctctaaagagcaaacttcacaggaaccaggcattgtgtcgatttcccaatggatccatcagctgcacagcgatcaaaattgctccctcatttttgtctgttccacgtcctgctttagaatgatgcaggataacaccaaagttgggcgaccgaatgatttgcacaaaactaagaaacgcgggtcatctgcttctgcctcaggcactcaatatttgtgagcacgcgtgacaagaactacataaatacgtgacgtgctatatatttagatcgaaaggctgcacaatatatggcaaattcggaaaggggatgccaaaactttcctcggggacctggttggggtctgatcgtcacgtccagaatctacccctatggtgtgacggaacaaagccacaatgcatgcgatacatcaagagccacgttcacccgggatacccaagggatcctatctttatccaccactcggggagctaaagcatgacattcgtaccgtggccatgacaatcacttgcggggatatcaaccggccatattaggtgcatccggtatcaaccccggcgcgagtgcagtttgttgccacctgcgagttgcctttcagcttatgtttccatgggttgattcatgacatgtcaagatcatgttgtcttccatcaagaaacgacacctttttcttgttccgaggagatctaactcgccacatggatatgcaatgcgtgattggtacactgtgttgcttcttcatttcgtagggcagggaatttgaccagttacgtttctttcggtgccctcttcgagtcatcacagccttagactcaacccatcagtgaagcgttgacggctccactattctttccgtttgctattccgcctgcgagtattatgcaggtagcactgaaacttgtactagacaagcggctatttgtctctgatcgccatttctcggaatcgggattttctaacaaatgagatgatgaactcggtggctactgctgctatccattctggactcatcatctgctctatcagccgtgtgacgcggttgaaacggaactatacatacaagtttatacatcaactatgggagagaactcggtggcaagagcacctcaacgtgttacattgttagctatcctgaaggatagactcatccttccgtttgtgaaatgctaaagaagcttgatacagcgtggccttgtcatcatagccagttcctctttgggattgagctcaatcattgtatatatcaagccttcggatgttcaatattttttttcggatctaccgagtttccttgttgagactaagctgaatcacatggtctaccgaacgactttcattctgggtagccaagcttctcaaaagtatagctggtgtgaggcgaagttcatacttcatgttctcccatcataaggcttcggaatttccacgttttcaaaagatagcctttgctacgaggctgacacagggaagaaatttaggtatcttccgagagtctgcgagtaagcttgcaattgatctaagtgtagaatgcgttacaaaaattacgttttgatatatgatttaggatgacaattgaccgtgacctactggtttgtcaagcttggaacctccgacagtcggcacatccattagttgtaattgtgcaaaacatctcttctcattggccagaaaaccctcctcatttgtcatccggctatgacctcaggtcacgtgtaatttaattgcgtcagagcggcagccgaggagaccctcgagtgtttttttttctattcacctgttgtcaactatctctgcccagtacattctataacataatgtctttaagcactccatctacaacaatgttccgccgcgctctgctaagcagccgtctggccactcccgtcgagtgctccgcccgaacaatcagaccggcattcgcacgctacagatatgtgtccagcgcagcccgactcccgaccatcacagcatcagagacccgtcgccgaccgacagtgcgaccgcaccagcagcctgcctcgcagggtggagtgaacggcctctcgccaaccagcaagcgcaccatcttcatccaaaccgaaaacacccccaaccccgacgtaagctcccaaagctcaattatctcatcttaacgaaagaaaccgaactaacctttcatctccgatattccaggccttgaagttcattcctaaccaccgcgtcctcccggaggacttccccagcacattcctcgagtatatgacaccacgatcaacccttgcaccaccacacccatccccgctcgccgcgaaactgctcgatgtcgacggcgtcacatccgtcttttatggcacggactttatcacagtgacgaaaggcagcgacgcgaattgggcgcatattaagcccgaagtcttcagcatcatcacgcaagctgtgacatctggcgagacgatcgtgacgacgatcgagggtgccatcggtaccgagcaagagagtggcgaggactcgctcgcctttaacgaggatgatgacgaggttctcagcatgatcaaggaattgctcgagactcggatccgccccgctatccaagaagacggtggcgatatcgaattgagagggtttgagggtggtattgtaatgctgaagctgcgtggtgcttgtcgaacctgcgattccagcacggttacgctcaagaatggtattgagtctatgcttatgcactatgtatgtccatcgacgccttcccgttcattttgttttgacataaaggctgtttgctaactttgctcttagattgaggaggtcaagggtgttgagcaggttatggatgaagaggagattatttccatgcatgagttctcgaagtttgaggagaagctgcgccagcagaagggtgctgctgctacggcttctgcgcctttggacagcgcgccgtaaaatacgatatctgggagtttataccttgtacattagttttgatatgaattttgcgtaattagattatttacccttctatggaactgcaaactatggcctctatccatattcattcacataaaatccctctgctcatgtagaagtactccagctctgttccaacggtggttgaccccagtctttcatccattctgagtgcaatctgttgagctgttgctctttcgtttggccgatagatcagcatcgaccgaatcattgccttaaacgccctcttttctttttccgtcatagtctccaagcccgcctcaacccgtgccttttgtatagagtattcaaacctctgacctaagtccctccgcgcagacatccctgactttgaattcaattcgccctcttcgttgaatcaatccagttttgcactccacttttcccaccactccgggggtaaaacgccaagtgcctcgacttgctctgcgttcacgcggtcggcagctgggaagaatgcatcaaacaacgggcgctgggcagcaacctcccagattatacaggcaagtgtctagatgtccgacgcaaaggagagcggctcatccgagaatctggcttcaggtggctggaggagagaaagggtcttcgagtagaatttgggtgatatatttgggttgaaagattcaccgaaatcgttcaggaagatcctctcatcgctaatatcaatatccccgcagcggatgccaaaccaaccgggaacaaacacttgggctggtataccattcgttaatggctttccatcgagacgaataatagcctctgtggaggaatgcgactccatgaataagctgggcgataatcgaccgcgcgaccttaggtcggaaaagcgccaattttgaagactctttagtatcaaacaggctcatctgtgcaggcggagtgacgatacacttatgcctgccattaggaccggcaacccaaaattcgtcgagaaggggcggtataactcctcttccaggtctagacggcgcgttcccaagagaagatataagtctagcctcctgcgtgtagccactagcatcagcggtgatcactttcactgccacatatcgagcttttcgcaggtcttgggctagccatatggtcgagtatcctccatacccaagcttgtctatcactcgatagcgggcattgtctaacgcatccccgacttgtagaggatgatatcctccggggtggtatctgtctaggtcttcgacgtcttcaatcagcctatactgggacataccaggtcttctatctgtagaagattcgttagacccagctgtattccgactggtgagtgtggacatcgacattgacttttggatatggaactgattcgatagaaaactgcatgcttgtctagagaaccgcgacggggctacgcgagggtgtgtaaacatctgcagaggcagcatctagcataaggtcaaccgtcacgcttagatagttggcctgacggatgaggtttaggttgggagctgtggttcgtcgtacactggccccccttgcctgtgactgcaaccaattagcgagtcctcatttcaagctcctctccccactgagtaggccacatccaccttgaccactcctccactttgctctgcatgttacggattactagtgtaaatgattggtctttcacaatatttatttgggtgtgaccacgtcctacatatgcacaattatccgtattgcatagtacaatgagacatacacagtacctacgtactgtatcaattgaccagagtccgtgtagtactatcctagcttggcatgtcttggctctagggggtgagaagcaatcaaggaatgtatgtagatcgaagtgtcataaccatggaaacattgccttgctcctagccaactcggggtcctatattactccaagagaaaaaaggaaaaaggataggaaagaaaagaaaagaagaaaacaggacacatgacccggttttcaaatgcaccttacagcgcctacattagcaaacaattaaaatggaccatagccaacggctggatgctgcaacatcttgtgccagggattaaacccggtcggaaggcccggagcagaagatgattcgctctaaataatttacagagtggacattgatccttgagtccccatagacagtattgatagattttctttccctatattgcacaaggggtggaatcatccattgaggggttgaggggtacaggagtcacgttggcaatgtcattattgtaccacacgacggtgtggcacaaagctgttcaacggtccaggtgcatttcctgatatttagagagagagatttatagatagcttccgggagagaagtcaaggtgccaaaaggaggatgttcgaggtgagaagaagctcatttgatattggaggggctggtatgaagtgtcagaaaatgcacgtcaatccggggtaaagtggaagaacctgccccgcaagcgtgtgacccgagggccgtgcgagggctttctttcttttggacgtgaggtagagagccctggcgatactagatactgggctattggtactccgtagagatgtatatactgtgttcgatgtgtatacgtacttctgactgagtgccacaaccccagatgatcggcttatttctccaagggacccgcctgttctgggggggtctacgccacttagccaaagcctatggagagctccgtcttcccaacgatcttccaattctttattattccatatatcgctggaagtgtaggatggtcctaataagttctgctttatgatttccacgtctcatctgacaaaaaagtcgacctaaacatctctaaaagggaagctcccaaagaaactgaaaattctaaaaccaaagatcaaaccatagtggcccgtgtcctccggggcaacgttgccagatccgtaagagaagttaccccaggctctttgcgttcccctcatcttttatttccccctctcttctctctcccactttcatcatctacacaacacccttcttcgatcgcaagatgcgccatccttaaggggatccagcctaattccgccctcccccacgtcatctgcggtcacagcttcgatcgtgcaaacccagcgcattctatttccaatagaccggtcatcgaatatccggattcagcatcttcgttgacacgcgcctcatcccatccccgcaaaaagcactcctactgctcgccagacctgtccgacctcttccatcgccctcgttcctccgttcacgaaatcaacctgtgcaactcggacacagcactcccccaacattcttgacgagacccacaataaccgtgcgcaccttgcaaatagagatttcgagagaaacgatcagagtggtgagtcgcgcaacatttctgccgagccttgtcctgaacgcgactgggctgatacatgggtgattctccagacacaattgcgatcacgcgactgctgttcactttcgactctcgtttccaagtggatactattttgcttgagagctgtatggtgatctacacgcgccagctaaaccagctaaagattctctcgagtatttgacaccaacttgaggtacgtgcgattctgattctcggtcgctttgctttgctataccttatgcggtgtgcgcctctccgtggcgctatctgcttctcttcctttcgcactcttcctttactccccttgcaatggtacttccttcacatccatgtcctttcgtttcagttgcgcatagctgtctcttgatcgaggtttttttttactatccccacttccggaccctctcgcaagaggggccgaggatatgcatatatgcacaatctccgcttttaatattgcgtctctcagtcatgccatacctacatatgcttatattacccttcgtttatccttttctttccattttactatctatttcaatatgggaataatcactgactttaatttagccggagttgaacatagcgcatcgaccagtcatccatcgttcgcttaaagagcaggaatcgacctttactccaatctcatcgagcgcgtggaccaagacgggtgctttctcgcatgtgttcattttaccacgagacatctatacagtacagctttgctattaacaaagatcgtacaggtcagtgaactacctctcattcctccatggcctcgaattattccttgatcagacagccgttgtgttgcttcactaggtttcaagtggcgctcatggtgatacggtctgcaaggaataatcgcatgtgtcacacatattatactgggaatcatatactaacaatgcaacagtgttcctctaaccgtaatggcatcgccatctaacaaatcgaccccgatggctcaatcgtccccacccgctacggcaacagcgtctgccatccttgaaaagactcacccaggcgtgcgccgttccaccccagactcggacgccttggcttcctctgacgatgatggagaccatggagcgcaagctcagaactttatcccccctaccaccagaccaccagtccgtcgcacctcttggttgaatgaagtgcctctttccgctcagcgtaaacattcgctgcctggaagccacctttcttccgccccatctaaccctacaagccctgctactgatcaggcatcatgggcgacagctacgagcccaaatcttgccggatctttcaattggaaccaacccggaggaagtacgcttccctggggcacaagcacaggaatctggaacacagaatcacgcagggaaccgccttctcgcttggcagaaatgataccctctccgaccatgaccaacccacctccttcgggcggcaccataccagacgaaatgttgagccctatcacccgtactatctctggcgattctgccattccattctccatcccgttacaaccaactctcaaaacctatcgctctcagtcatactctgttggtcagatggatccagagttcctcagcctggctgctggcaaggccggtgcaggtgcacaatacccaggaagtcgctcccgtgctcctggccaaatgtctgctgttcagcctcgagcatcacggcctagtatgctcggtgaattaggacatgatactgcaatgcttggtcgagtccgcgaggatgatgatgatgacggtgacgagagtttcaacggctcggaaagtgaaatgagctactcagcgagtcaggctcggcaaatcgagcagctggcccgcgagaacgcactcttacggcaagcagccgcggcaggtcaaatggataacagataccgtgaacgagctggatcggttgcatcaagcagtggagggggtcatccactacatcgcatccgaggcggcgttccagagggagatttggctgcagaggacctaggtgaattgcgtgatattaccggatacaacatgcgtggtaatgctcgtcgccgcttctctgagcatttggcgcccccggaagcgcaattctcgtccttcacctctccgctggagaatcgtgctctagataatgtccgcaaggctcattggcaaacgtctctaggcttcggtggcatgtctgacatgccacaaagtcgccgacattctttcgccgagattccgatgcgtcatggctcagtcggctctgtggactcgcattcgactgctactcctcgcgcaactataggagaccgtgatgacggctatagtaaccttggtgactatcccaaccgtaagtctatatacttctacacccttttgcttttgctgtcattcaatgctaatatcttctgcagaaccatactactcccgtgaacagaccttgcgtggagatggctcctcgggtatcccgtcatctctcaaccaatatgcgatgtcgaatgcatatgggcgtcagtcatccgcgttgtcacatgctcatcaaaatcagcttttgtacattgtcgccttcaaatgcagccgtgcagatgttttttacatccaagaagataccggtcttcaggtgaaaaccggtgatctagtcattgtggaagcggaccgaggaacagatctaggcaccgtcattcatgcaaacatatcactccaacaggcacgggagttgaagcaacattacgcagaagagcattacaagaccctcatgattttctctagacacggccagcctgaggggtccaccctcgccaaccccaacacgggcttgaacactcgaagtgccacaggtggcatgggtccccatggtcctcacagtgtgcaggaacccgcgacagacatcaaaccaaagcttatcaagcggttggcacagcaacatgaggttcttaccttgcacgataaggaaggaaatgaagctaaagccaagcgggtctgccagcaaaaagtggttgagcaccggcttaatatggagatcctcgatgccgagttccaaatgtaagtctacaccattccgattgccatccgtgatggttgaactaattgttacgcagggattggaaaaaacttacgttctactactttgctgattcgtacatcaacttcaactcactggtgactgatctgttcaaaatctacaagacccgcatctggatgtcagctatcaacccggcctcctttgtcacaccccctacgtctggcctgtcaggtcctggcaccattcccaatcctctctatgcccaggaagcagaccgtcgccaccaacttgacagtaggtcctatggcggagcgcgagattctgtcgacacaggtcgagatatgccgaaccctgtgggcatgcttcgcacatcctacggagagtcctaccagcctttttctcagccatcccgccactcagaagggcttaattcggatgcctttgccccacatgtgccatcgagctttggtcccgcagattcattcgaatatcccggcaacatcggtagctccaatggttcttcccgtgtgcacccagcgcagggcgaatggatcaaccggttccagggcctgtcgctcaactcctaaatcccttttcctgcctttccttctcttgaatctccgctcctcctcgcctatctctgtacaatcgtctgaccctgccctcccactacccacctgcgtcctgtcccatattatggggcttgttctcgcggtgaaaagagactccttatgaacctagatctgatcagctttgctattttctctttttcaacgcagatatcgccacctcgtttatctcgtctttttatcttttctccccttcctcaaagaatgctttccgctgaaatctggacgcgcttgccgttcgtttcctgtgttatgttcactgtgagctggtctatcatacttcttctgtgccccccgtaccctcgtttttatcgaggttttgaggtcttgttctgtactactgttgttagaattcatacccaaggcttgctgctctgccggacacattcccccattctgtcattaccgtccgccctttcttctcgccatagatctgttttttccgtgacgaatcatgtcttccataatcagaactatctctatctacaaatggatgtgtgtgttgtttgtgttaattgaagttaagttgaatccttgatttgagatactctcgtgtttgcttttggtatcccgttgataatttcttaacatacaagttgtccacagatcggaaaagtttgaaacttgcgattaccagagagaatagaatataaaatgggttcatacaaccctagaagagagatttgtgtcattattatggctttcctcgatgtacttccaaaatagatgcgtcgttctgttgatagagaaatgaaccaccatctaggtggccctcgaaggcttgcagagtgccatgcaccgcctccatgattcccttaccgggtctgcctgaatcgatcatcaagcccagccaatatgttggggtttctctcagtctgatctgagctcgcgtgacgcatttctattgtcttggctgtcagtgacctagatgtcgacaggccagaccgacaataggcgagagagaacattaaagccccggcatcaaggacccaagcccggagctagcacaactcgaagatatatcgtggcgaacagaaccaagtcagccttgtttcaggacagaaacactactaccatcccatcagcaccaactctcccaaaccaggaaaaaaaaaaaaaagaaaaactcacctgaagacctcaagcccacttatcatgtttcccactaaccttaacatccagcagaatctcatgaaaattcccgtccctcctccctttcctcaacctcctaacctcctcatcatccaacaccctcccaacaatcccctcaagctccttcttgctaatcttctcgtacgctttactctccttggacgcgcgcaacttcggcttaaatctcgcctgcatgcgcacgcgcaccgtcgtctcaaacgaaatcgtattcgcgtcgccgcggatctccacgccagaagcagctttcgcgttctcttttatcgagaggaaagactcgccgtcgccgccgtgcgtttgtagtgagaatgtccccgagacttcgggtgaggggattactaggaaggattcgtagtggctgactgccgaggcggttgcgctgaagaggccgtgtgtgtctgaggagaggtatctgtagttagggaggttgttagttttgcattgcattggaaaaataaaaggaagacagaattgaaatagaaattgggataatatggctatagtatgcgcatgcacatattgcgataaaaggcagtagtatcgattcacttacttcccatggtgtcccttgaaactgaacgactccgtccccgccacccgcgacgcaacccagacctgtcgcacatcgtgtggttctgccgtgctcgggtctctctcgatgaggttctcgagcttgctggcaaaaacttgcccgttggcgtcgcttgcgacgcaggttgggtcgtctgagggcaggactaggaccactgggccggcgatgtcgcttggagagtcggcggagacccagctttggtcttctgggttgtcgtctggttcgggttcggttttgcgcgatttaggggttggggcttcggtgtctgcggtgcgtgtcttgcgcttctttggcttgtcgcctttgaatgttaggggtttgaccattgtgattaaatgggtgatggttgttggagcttggagcttggagtttgagcttggagagtttgcggagggcggggacgaggccgggcttggctggggtgacggagcacatggttgactttcatttctatgtggatttggatgtggttttgtatatatagtcttctttttgctaatataaattccctctcggcgtaatatcgcaggtgaatgcttttggcccccattcgctacatgagtcctgactactcaatataggctagtgctgaactagtacggattgatactaaagcagcgactataacattcgactcttcatcatcaacttcttttttctcaaatttcattcctatctacgaaactctcgaccatctccttcatagaaccatctcacgtacataactatgtgccccaaacctggccgccttgcttccattctccgtccatggggcctgatctggttctcgatttgccgcaagtctttggtcaccgaatttccacgatgatactaatcatccattatagtgcattgggaagctttgacacaagcggttcgtcgagacggtctcgcagcacttggccgcccacaacaaattcgagatgccgcttcagcgaagttgttcagtataacctgtaaccaaaccatgtcttctctcaactcgtgcacagagtgaattgaccaccatatgcagctggaaatttcatcgcctatgaagacacaaccgttgttccctcgctcgtacaagctgctagtggcgttattctcgaactgggccctggcccaggcaatcagattcatcgttatgacaccgctcttgtcaagcatatctatggcattgaacctaatccgcacttcaaagacgccatagatgccaaattggacaagtataatctgcgggataggtataaggttatagtttgcggcattgaagacagcgatgttctgagggaagagggaatcaccgaggggagtttggatgccgtgctatgcatccaggttctgtgtgcagtaaaggatccaaagaatgtgatgaaggaggtgtggaagctgctcaaacctggaggcaagtttatattctgggaacacggatggagtagaaaccgcttgacgactgtagcgcaaggtgtgtatctgcctttcttcttttctagactctataggtgcttggctctggaatgacgcagaccggctaacatgaagaaaccttagcttgctggaatcctgcttggggcacatttgtcggatgtgatttgacgcggaatgtgctggcagacattctcaacagtggagagtgggaaaatccacgcgaggtccaagaacctgaagaaccgtttagtctgttgcctaggattcagggtgtgcttgtcaagaaggcttaatgcctacatcgccaatatgtaagaagacaaagtagagctcctgcaatagcagcagtctagacagtctaaaagacaacatttccttttcaattcactgcataaacctgtcaataatattgccgatccgatttgacagattattaatctcaaaagtgctttggtctatcaaggtcctcaatttcaagtacacacaacgtcaagatgtcccatatttcaggaagagatcaattctattaaccatctctaggaaaacgtactttgtatgatgacatccacgtctaatcatctaattgaaggtgatggcagccttgatagcagtcttgttgcgcgtcgcctaaaggcactcctcctcctattatacaccttgctcacaatgccatccagttttacctggccagagtcaagattgtcaacagcagcagggaacttgtaggtctcagaataactgctgaggatcgtgattttatcgccgactggaagggaatcagcaaagcactcaagagaagcgacagcaaaacttacagatcttggctggcggccacgagacccgaacctcatccgggtacacgcggtacatcaccaacttaccaccacgacgaacatagttaatcgagtcgtcgagaatcttcaggctaccagtagcctaaacaacaatgtcgaatccatacggcttctcagccttgagagcatcaaattgagactggggactcgcgcgacagctcaatgtacttgtcagcaccaagcttctgagccaaatccatcttcagacccccaacagaaacaacaacgacattgcaaccaccattctggcgcagcatcttagctaacaccagaccagtaataccatcaccaaagatcagcacggaagagcccatcttcggagtgatcttgtccaaaccgtgggcggcagaggaggtaggctcgatgagagtcgtgtcgatataggaaaagttcttgatcttatagactcttccagctgaaagaatatccaaaatcagccttgggaggccggtatgctgttgagatattctacttacccgggtaggcgcagtcgttcaccgtcacaccgtgagcctcgaagtgctcacagaacagctcatcgccacagcgacagtagaagcatatgccgcatggctcggaaattatcagcgaccacttgctcgccgatctcaggcacagggacatcaatcttgggctctgattgctgcagggcacgcatggtcttgggtacggaggtggccatgattgaatgtaggatgtgttatgtggagggaagagagaggaaaagttgagaagaggtggtttgacgaattgtaggggacatcctcaacggatcgttagacttcgctgttggctggggtgtcttggctgtcttgtttgctctttgcgctttgtgaaattgactgacttgaaacaagctgcggcaaggacccttgacagtggatgctactccgatccgtggccgtgtacatgtattcctagcctgagactaccaccaaccatcatacatgtgttgaccacgcacctaacactgccctagagacaaaatgatatgtttttctatatatacctaagacactctagtgtggaagtaaagaaaacaacttaggaaatgagagaaaaggaagagcaagctgatactatggacttgacagcaggtggcctagtggtaacattcatgcatgtgtactactagggaagtgccgaagatcttccaccacctggaatgttccggatcgatttaggttgctctcgcgttcgactcttttttattctcttgtcagatggaatatcttctcgcagtccgatggttttcgggggcctgtggtgtctaggtaaacacattgattgagatatttgaaaggatatctacatgcattatgttgtttgtcttccacatggaatatgcatctgtccagtgtataaatcgctttctaccgcttggtgctggtgctattcttgagcatctcttccaaatgctgcaaggcaagttagttatagggtctctgatagacatgtggacaagtcaaatgcttacctgcttctgctcaactgctaatttgccttgggtatcctatttccgattagcggacgttgcccaaacatagggctagcaacatacgctaatgatggttaaaatcaatgaataattgttgaagaggaaccgctctcttcgcttggcgtctgtaccattacgactcaatttggccaaaagagaatcgaattcagcagtcaaccgggccaggctgttagataccggctcatcatcaccagcatcgctgctgagcacaaggattccatgtagaagctgtccgaatcgttgagtcaagaagtggggcgccgaagactgcttcaagtcatctccgcctgcaatcgaaagggccgagacagcactgcgactagtgttggacccaactcgtttgagtgagtcgccatgctgatccataatcacttggaagcgtggccagagctgcatattggttccattaacatacgagtcggcgacgggcacctttcggcgctgaagctcaaacgcggaatgttggttgaggcgaacacacatgaggacacccagagaatccgtggtgtgctcgattaacttcttggtctggttctggccaagggtaaagaccggttggaatatttccacggcattgcgagagatttgatggaaggtctttggggagaaaaactcggtcaggaaagaatactcggcgcacacattgtccaccaatgcgaggttaaagtttcgaaacggcacttcgattccatggtaggtattatcctcttcggccagatatgaggataaagcctggagattgccagttcggaggacatcaatacgtctacccaaggagaaaggatcgtgtacggcagagccagctcggccgccaggcatcatgttccctgagataatcagtatatttgggagcatgagagcagtatatttcttacctgagcgatgtgtggatgggtcgcctccaagaacctcgtttcggtcaggaggataaaccttgaccttatcgagggcttgcaggtaacgtgtgaaatgagatgtgtaataccaacgcattgtgttgatgtacgcctgtgatatctctcctgccagctttgggtggacctttgagagataactgtatagatctttaaacttcaccagtcgctgttgttggataatctgagagttgatgtttggcgatcgcatagcacgaatttgtgacacaagataatctctgatcctttgaactgcctacatagatgtcaatgcaggtctacataatctgagggcagcatactcactttggtcttcacatcggctaaaaggggtcttacatcctcgacggctttgtagccgttggaggaagcagcggccttggcttcgatatttgttgttcgagaatcgatctcgttcagtgcacgcacccaattctcatcaattgggccttcgacaattgtccgcaccgccttgggggaaatgctgatctcctccacggcgggtcccagcagccgttccacgttgcgcctattctctagcatcgcgttcaattgtgttgagcgagattgcaaagtttcaatctctgcggatacggcacccagttcattctggaagtcattcaagtacagctcaactgacttggacacctcatcacatccagtaatagatgtatgtaactcttcaaacttatctcgctcttgctcaaattgctggacagtttgcgcgtttacatcactctcgcgcgttctttttattggtgttggatcctcctttttcagaaagtcttcgagacttagcccgtcaaaacggatagcttccaccaattgccctggtcgttccggcaccgacgatagcggcggcacatgcttatctgtctggtttttttcctttccaatgatttcattcaagacttccagcggatcgggaacattggccggtcgaggtcgttgaatactcgtctgctttaaaggagaaccattggtcgcccgtgcagttcctggaagagaggttgtagagtcgtttggggtcaggagaagagatgttgacgagcttctagatgttacaccagggcgactattgtagggacttggagatagctgggatgatgagcgtcgcggtaaaggagaaaggttgcggctattggctccggaggaagttgactgggctgaaatgcggtcgcgccacattgtgtaaagggatgaacggcatggaaatgcagaacaaaagcaagaattcaagtgtatactcggggaaatcaaccaagtaacctcaacaagaaggtcgaacgttgtagttgttaggttgtttcaggacactcggacgctccgcctatatacactaaacccaacaaggtggacaaccctcctcgaccaatcaccggccagtaagcgaccccgccacagcgcccacgatagattttagtcgtttgaatttctctctccccttctcttcatttttcccctccccaaattttacgaaaaacccccctctttcaacccctctacatctattcaccatgtctgccgaggaggtatgtactttcttttacaaattcgagatcccccaatggctgtctcgaggatttctgtccctgccccgcatgcggctccccttctattctcttctcgagggcacgaggctatattggactctcaaccccgccctattgtctcatttgaagcgcttgctaacataattcaatatagcacgatgtcactttcgattcggctgatgccggagcctcgctcacctaccccatgcagtgttctgctctgcgcaagggtggccacgttgttatcaagaaccgcccctgcaagatcattgacatgtctacctccaagactggcaagcacggtcacgccaaggttcacttgatcgccaccgatatcttcactgccaagaagcttgaggatctctccccctccacccacaacatggacgttccccacgttattcgcaaggagtaccagctcgtgagttcccctgatgacttgacggttgaattgttgggttgacgaatattagctcgatatcaccgaggacggcttcatgtcccttatgaccgacagcggtgacaccaaggatgatgtcaaggtccccgacaacgaggttggtgagaagatcaaccagatgttccttaccgaggagaaggagtgcagtaagttccaaacatatccaaacttcctcgggacttatcactgatatgtgccatcagacgtcgtcgtcctgactgccatgggcgaggaggccgctatggagtgcaaggaggctcccaagtctggttaaatttaatacatggatttattacctgttatgccagcctttatgttccacgagggctcaaagcccgccaaaaattttatctttcacggttcaaaggaggatacgattctttgaatgattatgcccattgcttcaagatctgtccccacataaccttggatgtgggctggaccgagaattgctttggttggcataatatgtgttgtccgaacagttctgagtctcagcatctcatgatagtgtgatgaataaatactcaatcttgcttgactgcgcgagggttctagtagactatgaagtagatgaatgaatttagagctcaattacactcaaccaaaatatacacaagtgtaaccccacaaataatgaaaaaaaagtacctacctagggactagaagcttgcaattcaatcgtctggtatagtccacggatcaatcacagcgcgcgcattgcgggacatgtggagcgacaaaaatcggcggtcactaggaggcagaaaaaaaagtcccgccatctggatataccaacccttctttgtcaaacaagcatgaacaaatcccttggggatggactacgttacccgaggggtctgcggtcaagaaggttgtcgtgagacccgatactatctagacaatggactttggtattgtcggcgcggtcatttgcaggaggtatgacgtccatcggcttttttttttatcctatcactgcatccaatgtcaggaagtacacagctaatggctatgcgacatgtgtagggtgttcaagtcgcagaagatgccgccgattttggaaacctaggcaaaacacatcgcgtgaagagagaaaccagggagaaggtcagcaagagtatgtaattagcagcttcagcctcgttctctctgctgactttactaacagcactccgtggccgtccggcatacacgcttttcttgcagacctaccagcttatcctttggaaacaatgtcatgccttggttcatgaacacgggttcccagaggaacttgaggtatgtgcatatgttgcttcttgtgttcaaggataacagctcattatttattagcttgttgtccgagatctctgggctcttcgtctgcaagatttcgaagcaagaatcactgattctactgatggcgacgacaatgatactgaatctgaggtattcagctcgcaagccgcaaaagatgaacctcgtgatatgggatttaaaccaaactcgagatatctcgaatggcctcgtctgatcgattctgttgcactgtgttatctcgcagcgttcttgatgcggcttcctgtctgtgtcagtgatttccacgggtatgtatattctttcctccatgcaagtttgcttctagaatgcgcgcaatactcacattctacagcatgataatgcggcaagagatcccctacgtccgagtcctggcaactgtcccccgagaaatgagggataggcttccgccagaactgactgcgatccttgaggttaatgtgagtgtagtctgactctgggatattttctgggttgattgactgatcttgaaaaagtcaatacctaatgccgagcggttccatcgcggcgtcctggcaatagtgttgttctatcagcgccggtttgaattggaccttcctcccttgaatttacccctggttcttttccggctcatcaagagattagccttaccaagtatgagagacagtccgccaagtggttgccagtttatattagctaacgaattttagttgagatatatgatacaactatgatcttgcaagatctattaggcttcacacttcagtatccgacaacaagttcatccgatggccgaaaaacagcacttcttcttcctgacttgcaattgatggtgctgattatcatttctacgaaactcctgttcccaatcgatgatttgaaaaggtatcccagcacagatcaagagcccgctgtgcaggtcatggactgggccctctgggcacgctcccagaaccacttcgatcgtgatcggggatttgggggaaatattggaaaaaagactgccattcagatcacagaccaagatgtgttgaacatgacgtctgcccaattagacgattacatggactggtaccaaagcagttggctcgatacctctaaggaacccagtcgcattgccacgatgtttcccatcagccgggcagaacgagatacccaaccaacctctagcgctgtcccagaatcatcctctgcttgtaccactgcccctgcctctgtccctgtccctgctactggtgctcctcctgataagactcgagagaagctcgaacttttgctacaaacagtcatgcaagccgttagaaccagaagggtcatccctgacgacaaagaggctgatcacgggcgtcccggcgagtggtatcaccggtatcgatgggaatcacatctcagtggtcccgcacggactttttatgaggtagcagcccagctcgctgcggtccaattgaaaacacttgttcgtgctgtcacatttgttgaattcaagatttcacagcaagatgaagagcgacagaacagagagtacttcgctaatttgggaagacaaggaatgcacaccggggaaagcgatgttggccacacgtatggcatggctgattttgaagaggacatgtacgaggcggggtccgaggatatggatggtgatgaaattttattgtaatcatatacacggcgctgggccttcgggatcatgtatctggcgttcacctttgtgtacaaccttttgtctttacctagttcaattacttgattttctaaggtttctgtgaattattgtctttctcgacgcattaatctttccagctgaggtggtagtcgaaggatttgtttattcgatcaggaaataccattgagaacagaaaacacgcttcatttatggtgatctactatacttgacgtagatgcactaccaagttatcattggctggttggtcgggctgcttacataacgtatgacgaaaatgggcaacaactagggcttagggtaccccgatcggtccacctttgctaagcgagcgaaatcctcaaattgacaatcgacagctccgcctggaacacagcgaccgacagccgacaacaacgagaactcgcaaccagtacgtcccataaacctcgtgaaacagcatccatgcatcgctatggattcagtgagctaacatcgtctttttccgcgccgtttcagtgcagatgtaggtctttctgaacccttaaatgtcatcgcgaaccacaatcccgatcccatcgccaatacgacccaaacccatggaggaaaaatgaatatgggctaatacggtgcgatgtagtttcgtcaagaccctgacgggtaagaccattaccctcgatgtcgagtcgagcgacaccatcgacaacgtcaagaccaagatccaggacaaggagggcattccccctgaccaacagcgtctgatcttcgccggcaagcagctcgaggatggccgcaccctgagcgactacaacatccagaaggtaggaaccggaattcaacttgtgatgtgatttggaccgagagcggggggcattgtggtatctcgggtggatcagatttccaacatgttcttttttcagagataaactctgtccacggatacgcaagaggaggaatcatcgctttgcgttatggtctatggtctgcgaaatggtggaacattcgctaacatgcgatatcaacctgttataggagtccacccttcaccttgtcctgcgtctccgtggtggtatcattgagccttccctcaaggcccttgcctccaagttcaactgcgacaaggccatctgccgcaagtgctacgtacgtttaccccgccttctccgcctgcgccagatgattgtcatgaagaaatcgcctttagtggcaaggccatgaattccatgtactaactcgaacctattacaggctcgtcttcctccccgtgccaccaactgccgcaagaagaagtgcggacacaccaaccagctccgccccaagaagaagctcaagtaaacgactcgccccttggtcttgtgctcggcgtgctgttccagagatggggattggctggactgctacatggagaggattacaaatggcgttagatatgatgataaaatcaatgcagccaccgtcatactttttctagttgactcctctcgacgaccaagttgcactccatgaaatgaaatgtgtaaaattcaaaaagtcgaattgcttcacatctccaaattccgtccgcgataaataaagagtacaatacatgcatgcgttcaataacacgactaggaaaactgctacctgagcaagaattgacggaatggccagtattccagatgaaaagccaatgatccatcctccctcgcttatgcccggaacatcatccctttcgtgtcgtccttgtcatcattggggttcttgtccttgttgttgttcttctttgaaaccgggctcccgtgactagtagatatgttagctcaaggtcaatttgtttgtcagacaaggacactacttacgcaaagaaaagcaccttgatagcaatagccagtgccgcatgtagcacaacaaccaagaccaagaggatcttgctagccttggcatcagtagcattcaagaccggatacaagttccgcagaaggaagaagacactccaagcaaagccaacgccaacaagcgcccagttcagcgcagtcaacggactccagctgaccagtgcaacggcaatccagaccaagttagagtatccatataaagcccagcactcaataaggtcagccgtcgagctgccgaaccaacgcagcgcaccccacagggcaataggcaaaatgccggtgtacccatagaccagaccagccgcgcccgatagcaacgtgaagtcgtactcgaagtgcttgtcatcattgttcgacagccattgcgagatagtgcctgtcaaaaacaggataaccaccaccgtagtcgcgatccagatcggcccgtataggtctgcgttaccctctagcacatcgaggaagttggtgcgcggatacaccgttgccacacagcggcggaagacttcattcgtgtcgacatcgaagaattgctcgtagtaatgcagcgaccaccagctgtatttggccggcgtaccgccaggggaccggtcacggcggcgcgatggcccgccacccaggaacggggcggagtcgccttggactttggcggttctttggtcgttttcaaagtctaagtaggattacttagttagagaatcgggctgggccggttcgcttggtggaactcactggaggggtggaattcgaggtcttcttgcaggtcggtatggccaaggtcgccctgctgatttgttagacggaatggtgtgttgttcatcacagcgctcttacctctgcatccacatctactacgacatcgtagcctcggttcgccattgtggttagttttgaggtaagctgttggaaggggagttgttaagtgtacacatcagcttccgcagataaagccaccgctcaagccacaactgtggataccagatcatacacgagtatgtagctaatatatattatttgctatgaattgactgagttctttcactacatgtaaattatgaagttacgatcctcagatataaggtttttttttggtttctgtcactttttctctttattatacacatgcaatagcaccaagcatccgcgatatctgacacgttggcttgagattaaacccagttccggattgccctttgaattcggccaacataagaccaaatcgaggtgtcgagtccctttttgcggatatagaaagatgcagttccaaccaatatagccagtaacacagaacccacggagcgacggtggctccataagaaatccatagctcgtttcctgcgttcttcggcccgaatctgttgggattgcttttcaaaaaagtacatcgcgtcttctggggtgcacttgcgatgtgggtctcgtgaagtcttgagcacgctacaccagggaatatgtttccaggctccaaacggcaaggatttcggcgggtggtcatcaaagagccgagccgcatgcagaatgtgtccatcaagatcaagtgggcatggcagcttagaaagcgtaaaatgaagcatctcgggttcatacactggtattgccagcaactcttttttcctagacaggatcattgctgcgaagaggtaaattgcaaccacaggttcacgagataaaacaaagtcgaaaactcgtgagatattgctgtactcttgaatatcatgggcgtatagtgtcagtgtagctgcgagagcgaagaatggttcaatattgtcaaggtgtcgtcttagctcagggtccgttgtttcgattattgcaggaatgagatgaagatgtttcacggctggagacagcgatggtagcatgtagtcacgtatgcggaaaagggatatctgtgctactgctggcacggcctgcttctcgcctagtaccaaaagaagaacttggactatgtcatgatatccttggaaataacaaagcatagggtattccctaagcacctgggtgatcagttttgatagctgctctttctttttcaacatctcctcctcgggagctagactctattaatatccaaactcgtcttgtatggagagttttaatagcataccttttgggtaatagacaaatgatcggttgacgtcgagttctacttgttcctcatcggcatgtcgtaaaagttcagtacttggggccgtatcaaactgtcgtatttggtcgtcgcaacgtaacaaaataggccctgttcaccagttagttgagtctatgtgtaattttaccttcttcaaaccggaatatatactcacaggctatctgtctcaagtcatcttcaagtaacccgccttctgaagttgcgtgcacagccaaggcttccacatcgcgcgccgcacatgctttgcggatggcttttgccttttccgctcgagccatctgttttgctgttgtatccaattcgaaattgtttgagggttcttctgatgcagatgtgtcctcagagctgggatgacccggttcttttccggtatcttccattctttattcgctaagacgtccttctcaggagatcaagcagctaatatgcacacacaccagaaaagatgaaagttatcactcggtttgtttttcaatctaaatgaataacattcaagttgtgcgttttgaatttggctcaataacattgagagctcaatcggatatagatcgaccggagccttttcaccggacaacgagacgacgtgtccaaagcaacgactcaatgccaaatatgtgagaatgcgctttacctttaacaattaaggtccctttgaatgtgagctgatgaatgtctaggcacgtatacctagacgtggaaagtctgaagtcaaaggcggcggagtcccgcttagcggccttaggcatccatcggcagccgcgacatgttttccccgataacaacattcgctctgtgttaggcttaggcacaacgctccggtttatgcttttcagcactcatcgcaagatctcggacacatatatttgtgtaccgtgttgtgcgcccttaggagttcacagtttctggggctccgacagctcaccgacgggcggtcattgcataactccgggattggcttgctctgctagtgatagtgttagctctgtggcaagtaaggaattgcttcctggagcttggaaaccaatggagcttgtgtcaggcacgtcttcgagagctgatactactgtacagcgttcgggcaagctgtaagtctcacattgacatttgttcttcatatgtggggtacattggttaataaagatattgcagggcttgtctgggacacccttgactgtggaatcactgtcaactgcctatactctcttcaggctctagttgtgcatcggatatcaattcacagccagtatcgcatttggcagttgatgcataaatcgcatttgagacattccactctttgaagtatgaagacaagtggaccttgcaagcatcgaatttaattaccatatttcttgaatataggaagttacagggcggtgtgcagttcaaacaatattggggcttattgtgcctcagactggctcttgatattgcctattgcctactttccttactcgtttacttacgactccgccttatatcttccatctccatccttcatctctctctttcacaacaatcttcaagcttcttcgtatcacttgaccccgctatacgcctttggcttcagaatcatcttctcatttgctctaatctgttatcggtttcttgtgaaacccactcaattactgcaatgtctggcaaccagcccgtctcgcgtccgacgtgtctgactggactgctcacccagccactgatcccaagtcctgtcatcaactggattcttccagcgcgtcttcgagataaagaccacaacgatgttgttttcattggagagcggcgaattcaaatcaaggaagccctgcccaatggtcaccttcaagatgttgtcgaaaaatcagatctcgaaggctcgctcatcggggcaaaggtcatcaatgtaagcactcagttgccctgggaaactcagcctccatcaagcttgatggctcaccctcacgacaaaaatcaactcccacctcaaattcttttccttgctacggactcaaatgagctccttttcatgtactactcagagattggagatggcccatttgtttcctacagtcgacctttgccccgcgatgtcaacatagccgacaagtatggcaagcatatagctgttgatcccaagtaagtatcgcccattgctaactcagttggatcgacgaaagcttacaccatgatccaggtcgcgcgcggttgcagtcagtgcgtcgcgtaatttcttcgcggtcttgtggttaaaatctcccggcgaactccagatgcagatggcccagggaaagctgaacccaattgaatgcgtatgtcccagccatattttattggtcgtttgcctgataataacaatcaacaggaaagcttcgtacaagtggagggcgatatcctgttcatggaatttctttacccaaaagacatcaatgacaaacggaccattctacttcttctcgtctataaacttggcacaacacggtctatggtgttcgaatgggatgaagccagtatgctcaaccgcatgattcccaaacacacctcaatctttctgcctcaggaagaccagttgcctagcatggtcatccctttggctaaagaatcctcctacctcctgattaccacaaattccatggcaatgtacacacccaattcctcgtctcgtccgatgcgatacccaccaatcattccagatgccgaatcgtccgaagctggactgtggactcgctgggccagaccttcgcggaactggatgtacagtcagaggtacgatggaatattcctttgtcaagaaaaaggctggatctattatctcgagtttggcaacgatggtgagctcgaaacccagacttctctgggtcaactccactgcgatgttgatacggcatttgatattcttgatatgggccatgaaggtggtgacttcattctcgctgctggaagccagggtgatggcggtttgtttgtccaggaggcacgggatcaccccagatgtgttcaacgattcgtcaactgggcaccagttcccgatgcagttgttattccctcaaacacctcaggcatcttcaaagacactccatatgaacacgatcggatatttgtctgctcaacctctgcttcaggcaatggtgctatcaccgaacttcgatacggcattgaggctcagattggagtctcagccgcattgggtggattgtccagcatacgtgatatgtgggctgtgtcactcggtgctaaggattcaatatacctactagcctccgacccgctctcgtcgttgctccttcatacgactcccgacatgagagatggcattactgcccttgaggatgatacaggtttggacatccaacagactttggcaatggactctacaccttccggtgttattgttcgagtcacagaaagagctctgcacttttttgtccctactgatttctctctcagcagctgtgttcaacatgatccccttgtatctgtcacagcagctattgtggacggcccaagttccactattgtcatgactacaagaagtaaaaggggaaattttctccactttcttcggatagtcatgactgaaggacgtgcctccctatctgatcatgaagttccataccaactccaaaaagagcccatctgtatctcccaccagaattggggggaagttggcttcattttcctcggtaccagcgatggtacagtgctatcattcgaggtttataacgagactggtggaatcagacaacatgccgacactcgtatctcagtcggacgcgagactgcaaaagacatgtcagaaacgattgaaagcctcgctattatcaatactatctcaggcggtagaagccacgcgctccttttatgtgggcttcgaagtggcatacttgttccattcaatgtagatacaaacgtcgttgatcatcagggtgaccctgtattcggtttcaaacgtgagtcgtctttcgttcagcagactggtcccttgcatccctttcattaaccaggcactttcccttcaggtttggaacaaagagcgccacaccatcttgggcaaacatcaatcaacctcaaagcccacaataattttgcattgtttacatgcggagatgatttctggcgtgtgtcatgtgccccgaatggcaaggacttggactgtttcttgtctcgcgtttgggttacagatcaaaactgcgtaagttatattacatccttcccttttgagctatggtctaacattcatgccagcccgcatactttcctaccaggttcagcagcttcgaccttgtcgatgtaagagatcaagagtcagggattccaactacatacatgttttgttttgcggatggtcaacttctgatatgctctctggatcaagaagcaaaggtcgttcctcggcgcatcgacattcccgggaatccaagcaagctcacctactccgatcatctccaaagtctcattgtttcatattctgtgacccagaccggaaatcaagaaagtcctctcgatatttcccgcacggcatgtatcgagtttgtggacccagacagacagtcaccagtggtctctaccgataaaaacctggttgcccaaggccatctcccctggagaccacatggagtttctggtgagaaagtcacatgcatttttgactggatgccatacaaggatggcaatgcataccatcttatcgcaattgggacttcgatcagtttgcctcatcgacccaatgaccgacaaggtcgattgatgctcatacaagcgtctcgagatgccaacgatcctgggcagatcacttgcattgacaagcacacacaatggtttaaggacccagtttatgccatgacggcatacgacgatagcttgattgttgccgctgggaacaaattcttcacggtcacctcacgaaattctatgacgaaatgggttcgaaatatcacagctactcttccatccccagctgttgagatgacaatgcacggaggcatgatctatgtcaccacctcgagacactctctgctggtctacaagatctcaaacggggatatcttaatgcacggtttcgacccaatggcacgcgatggtttgtcgcacagtttattggccgggcatggatgtcaatcggatctccttcttgtgagcacccgaggtggagctactagggcattcacagacctcgatcaaccaggtgaccttgtgcctcgtccaacggccaatctccccgtctcattgatcaagctcactcgaggctacaggtctccagctgtgctgacgaccactaagaccttctatggttttggtatcaatggatcagtctacaggctcttgtgccttggtgcgaaggagtggcaccttcttcgacttctgctcaacatatgccttagggatgaggtcatctgtccctccctgtcccgcaggcaccgctaccttgatgcaatctcccaggtcgagaacagtatgcatatcgacggcaatatcctcgctcgccttgtcagtcgcggcttgaagcacctggatgaggttctcctggcgtgcaacgagagtcagttcaaggacctgactcctgaaacagtgcacatgttctttgaggcagttcgggacgtgcttggggttaatgaacaccatacccaggcggtttttagctggcttcgtcatattctacacgttgagatctaagatatgaagagtatttggccaaggtgaagaagtgtggagaaccaagcttggaggacatagccctggaggtttgagtcaagttgtgagagtgtatctatgccctagttagataaaatgttagtattaatgttcgaagttcgattcctggtagcttagcacatatgcgatatcagagatcctagggaaaaaaagcccctgacagtatggggcaactcagataggtttgtggttgtggcgattagaaagtcaagtccgatgccatattgttccccaccggccatgattcttcccgaaattcttttcccttcccacacccctccctaggcccacgttacagagagctctatctctcgcctttcattctggggattgtccttttttgacttctgacatcctgcccctttaatacgtgtgcgtattaatacaagtcgcaagtaaccggttaactccgtttgtgcgcccacaacactccaatcggaccaacaaaatccccaagggaaatctatcgcaatggcgcccaagaagaagagtaacaagaggcaggaagaggactgggaggctgatctcggcgagtccgttcccgccgccgctcccgccgacgagcagccccaagaagatgccaacgaggaggcagcgccggtcggtggccttatggctgctttgagaaaaaacaaagccaagaaggctaagaagggcaagaccaatgactttgtcgagggtgaggacgccgagggtgtcgatgctttggctagcaagcagcccgaggagggtaacttcgatgatgacgatgtcttcgctggaaagaagaccaagcccatcaaggaagtggttaagcctgcggcggaagagcctgagggcgagttccgagtaaagagtaagaaggagaaggagcgtgagaagaaggagaaggagaagcagcgcaagaaggagcaggtaggtttttacatttttcgccatgctggaaatacgtgccgggtgtccagctcatttactaatcggtctttctctcgtctacataggctgccacaaagaagaagctcacccctgctcaagaaaaggccgaagccaagaagactgccgccgctgaagccaagaaggatgaagccgccgccgccgccgccgcatctaccacagagactggcaagaagaagaagctccctcctcacctagcagcccttcagaaacaacaggagcttcttcggaagcaacgtgaggaggaggagcgcattgcagcggaggagaaggctgccgcggccaagcagaagctcctcgatgaagaggaagagaagaagcgtgcagaggctcgtgagcgcaagaaggagaaggagcgcgaaaagaaggaacagctacgcaaggaaggcaagctgcttaccaaagctcaacgagaggccaaggagcgcaatgaattgcgcatgcagcagatgattgccgctggtgccaaggttgctggcttagaggagggtggcgaaaagaagcagcgccctgtatatgagaacaagaagaagagggctggcaagaagcaggaagaggacctcgaagccgccgccgctcgagcccaggctcagcgcgaagctgaagatcgaaagaaggcggccgaggagaaggcgaaggctgaggccgccgccgctgccgctgctgctgctgccgtcactcctacggaagaggacgccattgaagactgggagcaggctgccgatgaagatgtcaaggacagctgggatgcggaatctgatgaggaagagaagcccgctcaggaggcaccttcccaaaaggatcagaaagaagaatccggctccgagtccgagtccgactccgacgaatcatctgatgaagattcatctgacgaagagcaatccgccaaccaaagggccattcaggcaagaaaggccgaggctgcggagcgaagaaagctcaagcacgaggaggctctggcggctcgttcgaaggatgatcttcgatcccctatttgctgtattcttggtcacgtcgatactggtaagaccaagctgcttgacaaaatccgacagaccaacgtgcaggagggcgaagctggtggtattacccagcaaatcggtgccacttacttccccgtcgatgctctacgcacaaagacccaggttgtcaacaaggatggcaagttcgagttcaaggtccctggtctgttgatcatcgatacccccggtcacgagtccttctccaacttgcgatcaagaggttcctccctctgcaacattgctattcttgttgttgatatcatgcacggtctcgagccccagactcttgagtctatgcgtttgctgcgtgaccgcaagactcctttcatcgtcgcattgaacaaaatcgatcgtctttatggctggaagaagattgataacaatggcttcgaagatagtttggctatgcagaacaagggtgttcaaaacgagttccgcactcgtcttgaggccaccaagcttgctttcgccgagcagggtttcaactccgagctgttcttcgagaacaagtctctgtctcgcaacgtatctctcgttccgacctccgcccacaccggagagggtgttcctgacatgctgaagctgctgaccagcttgagtcaagagcgtatgactaactcgcttatgtacttgtctgaggtcgagtgtacggttctggaagtcaaggtcattgagggtctcggtaccaccattgacgttattctatccaacggtattcttcgcgagggtgatcgcatcgtaatgtgcggtctcaacggacctattacaaccaatattcgtgctcttctgacaccagcaccgctcaaggagctgcgtctgaagtcccagtacgttcacaacaaggaggtcaaggccgcccttggtgtgaagattgctgccaacgacttggagcacgctatcgccggttctcgcatgcttgtcgtcggccctgatgatgatgaggaggatcttgaggaggaggtcatgaccgatctggagaatctgctgagtcgtgtctcgactgatcagcgtggtgtcactgtccaggcctctaccctaggctcccttgaggctctcctggagttcctcaaggtttctaagattcctgttgccaatatctccatcggtcccgtttacaagcgtgatgtcatgatggctggtaccatgctcgagaagaataaggaatatgctgtcatgctgtgcttcgatgtcaaggtcgataaggatgcgatggcctatgccaacgaaatcggtgtaaagatcttcaccgccgacatcatttaccacttgttcgataacttcactgagcacatggctcaaatcacagagcagcgtaaggaggaggctaagcttcttgctatcttcccctgtgtcatcaagcccattgctgtcttcaacaagaccgaccctatcgtcatcggtgttgatgtcattgaaggaagcctgcgtctccacactcctttggctgcggtcaggaccaatgccgctggtgtaagggagattattgatattggtagagtgtaagttttggttccctggattttttcccccttttgtctgatttctgacgcaatcgtttcacagcacatccatcgagcgcgatcacaaggctgttccagtttgcaagagaggccagccctccgttgctgttaaggtcgagggtccgaaccagcccatgtatggtcgtcacctcgaagagaaggatcagcttatctcgcatatctcgcgtgctagtatcgataccctcaaggagttctaccggtccgaggtatccatggaggaatgggctctggtcaagaggctcaagcccgtcttcgacattccttgaattcagtcttagggcttccttccggtgtgcggtgtcttcatatcaaaagtcgttagcaccggactcattccagccttgcggtacctatcctcaagcgaacttacgatcaaatgccagtaagtggcgagctttgttctccgtcggccctcatggccttcggttccatcatagccagtttggaggaaacgaatcgaaatttactaagctatgacaattgctatcgaaaaacggaaaagttattctattttgattacgatttgaacatacaatgaatgaccatgacttgatggatgaacagcgagagaggtcgcttgtacatgatataggaaaagcaaggcctggtcgataccagatcttttgtttctgttgttatagtggattgaactgatactattcaagtatttgcattagcgaacagacatttggactaccatgtagttgatctttatcttcaacgcagaaagcaagcagaagcaattgactagtttaggagctagggagatctgtttcttttctagcagagaccaaatcgaacggttgcttcacaatatcagaatagaccagctgatctactcttcaaggtcatattcagcattatgtatgtaatatgtacaatcctgttctcaaccgaccaaatcacctttggatatcaaacactcggcaaatgagcactatttcagcatcaagatttccctaactcaaatatcatccccctcccacctctcaaccttcccgccatgtctctcccaatccaaccaactacccatataaaccccgatattggcagggtcatatccagcctgcacggccatatgcgctgccgtcttagcccgcacaccagccttgcagtagaagaccatctgcgcaggctcgccctcgctctccacaggatcaggcttagggaacccgaaccgggtctcgaactcgtccggggtgagatacaatgcgtctccctgtgatgctagcgggatgcagactgcagatggaataatacccgtacctttgagctcggcaggctcgcgcacgtcgatgagaattatgggcttgtgagttggggagttgggggttgaggatgggagggcggcgttgatctagatttggttttgtcagcttattatcaatagcttcatggctgggttcattgtggtgtttggtccaaataaggaagtaatggtagaggaggaggaatgacaacagactggagagtacatacatcttcgaagccccattcctggagtttgactgggctggcctcatcgctgttgcaccgcgtctgcacctggcccagattcttggtgttccggcttgccttagcttgggtgctgcatgctggcgccaggcggctggggaggacacggttctgaggagaagtgaccagtcctctcgtcggtgcggagagagctcggtgcaaggccgcggctggtgataccgcactgcgtgccgagattctgactacggcggaggacaacacgacagcagatcgctggatcttcgatggcaatgtcgaagccattgtttcaactctggattttgattgtccgcggaggtgaggagttattacatctccgaacgtaacctcgggactgtgatgtcagtatctgccgtgggtgaccgcctactggtttaggcttttgttcattatgcgaggcattgtacaagctttgtcgagcaatattgggatttttggttggctagaacgattcggttgattaggttgtaactagggagggttctttagtagacagatgtttcgtttgagttttgcatagatcttgtagagatggcacagatatcacagatatatagtggagtgtatgtatatcaaatgaaaacctgtaattgagaaattcactaaaaccatacatagaaaaacgagtctagtcctttctctaaactcaaaaaggctatattgacctttaacagatatcaggtttaagattgtgataaaaacctcccaaagccaacctgtaaaccaagaagaaagactaaagagattaagtatataattagttgattcaagcacacgaacagttagataacatgtcataatattcaagcagaaaaagataattaatattgttctaatatgcatggctctaggagtagtcactctgaagaaatgaaacaagaaacccctgcgacccctcacgggcaataggtaatcataatcgcagcgggggctcctttggaaaagggtatggaaggtctctctaagagaaacatatgttaaagacttgtcctatatcgagcatgcatcgaagtcgaatgagagagaagaaagtgtcagcggaccatcccagccccaggacaggaaggcatcataagtcctctgtccagaaagtgtggctgggttccagctttgcttttgtgttttgtacaaagaagagaaaattcaagggcgggcgcggaacgtaagaagacagtcatcctgatatatattagtgaattgatcggggtagaaaataagcttgaacatacctgagggaaaatggtggcaaacaccttgatatcctcggactcgggagtaggggtgtgctcccagtccatcaccatgctggcctttccaatcatggacatcagggaaagctgagcataggtctgacccagacagtagtggggacctgtaccaaagaccaaccagttcttggtctgctgctcagcggtaccggtgatccagcggtctggatcaaacgagtcggcgttggggtaagcctcctcgtcatggcatgcgggccacacggagggaatgatcatcgagcccttggagacggtgacagtctcgctgatagggaagtccttcttgaccaggtagggaaccatgatgacaggggggcggtagcgcagtgtctccttaacgacggcgcgggtgtaaggcatttggtctagcatatccatggtggcggggagagtgcgatcaccgttgcggacgttaaggttctcttcacggaccttgtccaggatctcggggcggtcagccatcagctggaacaaccaggtggaggcggcactggttgcatcctgggaagcgaacaggaaggtgaagatagtctgggcaatttcgaaatcggagaattcacgaagaacctggctaggcttctctgaagaatcgacctgaattcccttctcaatcttctcgcggtatgcggcggaatccagctgggccttaacccaggcgtccatgatgcaggaaatctcaccaccagcagccatacgggccttggacttggcagcacacttggtgaactcctcaagtaccatatcagcggccttcttgccgtaccaggtcttagtgtagggaaggatgatagggaagttcaccagctcaagcgcggcagtaatcagatagtagtcatcggcaattttctggacgccctcatcagtgatatagtaaccgacaaaggtacggcacgacagagcgcacatgagctcgcggaactcggacatccaaggggtcggggtgaagttggtggcggcggacttctggaggaatttctcgttgtaggagttgaagacctcctcggagcgggggaggtacatcgccagagcctggcgagtgaacaacccgttcagacccttgcggtaatctacatgggctttgccatctaagaagacccaattggtcttgccgagaagcttgtgcgcggcatccacgacacagggcttgacatagccgggcgagttgaaaatcttccgggacatatcacgagtggatgcaatcacgacgaaccttagtagaaagtgttagagaacagacccgaaagaaacaagtacatcagggacttctcacttgtggaagaccgacacacagctgaggtctccgctatcccatttcgccttgtattcggtgaatttggggttgactgattggaggaatgggcccataaagggaatcttgtacatagggccaacaatcgcacccttgaggtagtggtatttgactgcaaatagggggtctgaattagtttcaagacgcgatttcaaaggccacacatgtcgcatttgcactcacactgatcatagatgacggcggcgaccaagaaagtcaacaggcccttccaaatcgtgaagccatccaatacggtggcaatgagaccggccggcgcgaaaagttggggcgagaccgtcgcatccgccgatggcgaggcaaagctcccggtgaagttggccatgttgaccatactggggagtcaacggagtcaaagttccgggcaggaattgaagagaaaagtaattgctaatgagaaaggaggaccgaatcccagaacaaaaagggaaaaaagtgagtggagagagaggggggagagaactgactggggctctcaggggcgggaacgccaattacacggaggcccccgggatgctcagcattagcccatatcaatgcataaatagtttgtgtttcgaatggtttacgaaattaacatacaatagcttctgtaagattggattcttatgattttattgattatttgtacagagatattcttacgcccaagttattatttggacaatctctgcttaggcccatagttcgggggttcttagtactaatctccgagccggacttaatagtatcgaagatgcgcaaagataacgaagtcacgaatagcctagaatgagatatgtacatagtatggagtacctacagctacacatacaataggacaactatatatgtacgtactccgtttgtatcttaaaatacagacaagtcagcgcaacgccatatcacaattactcagcacgacgtgaccccggctagagaattcccgagagttagatcggcgctgattggttgaacgttgattggctgaacatcatgtaagggctcctatatgcacgtgcttgtgcttgctactacaacgtacatgtcgtactacttatgttgtacatattcacgataggaatcaatgggtattcataacatggcatctatgtaaggggcttcagcgaccaccgaaaccaaaccatccacgacgacctttcgtttcttcttccacgggaccttgggcttgagcttgtgtctgagtcagagcctcctgtcgctgaccaccttcacgtgggtaatcaatgtagttccatgccacatcaaggaacaagggcttgacaggaatcggctgcatttgaggtggatacggtaccaaattattgaggtctagtccagatcctgcaaattgttgcagtcgttccaccactggccgttggctcgactgtgacgcctcttccgcagtcaccttctccagagtgacaagtccacgatattgagcaaccagttctcgcaaggttgactccaaggtactcgcttgcacttgggatacgtcgagctttgggacatcttcagcatccgttgctgactggggggaaacggaagcggcaaggttcaaggcttgggaaaacagcgcaagagcctcctttgatctcgaaagcactccatgggatcttcctaaagcaagacatctacaatgaaaaaaaattagagattagttgcgaaaatcggtgaggatcatggtgagaaccatacctgagggcacggaagtagtgccgctttgcctctagaccctgcacaaaggccgagtcggccgcaacacccggaagctcgagaataaattccaagctctggagtgttgaatcatacaggacgacccgctcacggagtctattcaacttcttgccattgcctgtggtgtgcttcgcagtttcctttccacttgttgtgggttgctgttcctcaaatgacaagccgtccctttctccacacaacacccggttacgaccgacccgccagccaaccaaagtgtaattcactgcggttcgagtgatttgcagggcctgcattctcttatcactgggatcaacaccctcactagccaagtcatcaatggcggatttcgttgcatcgacagcatcctgactggcaataatcacgttatcatacgcagcagctttctccttagcagcggcggactttccagcatctgccaaccaagtagtgagccgagcctccgcggctgaagcagcagccaacgattgagaaatcgaggcgtcgtccagtgggacagtccgcgacctccaagtgacagattggggcaactcctgcacttctccctccgcagtgcgtcgagtaccggctgcttcttcagcgagacaagaggggtcgatcttctcaacctcagcgcaaatctccgaatccgacgggaagaattcaatcgccagtgatgatgtgggtttggaccggggaagcttcatctgataagccgcgtatcggagactagggtcaacagtcccagagaccaggtcccggaaagcgtctttcttgaccctttgacctaaagctgtgtaaatcactcttgcaatggaatagtcctggagacactgttcccatctccgcttctcaagccacagggtgccagaaatcatcgccaaataagcccgagactccaggatatccatatcacttgccccagaaagcgattgttcgtgaagcagcgacactagatgctgtgcatacccagtggccttgttcagtcgcgaaataatgtgacgccgagcagcaccagagatgccctttgcggaagtatctgcggaatgtgtagacttcatgtgcattgcttgcgcccaagctcgttcggaactaagaagcaaaagatgtacgtatctggcgtgggttagaaactaatcgaaagagtaactgggactggaaaggtaagcaacatacgacacattgcttccaagattctcagcagtcacagctggtttggcagtatacttgcggcctttgacagtggcctgaccaagcttcttgcggagtttctgcagttttctggtagtgtgcgcccggtaggcattgtagtctcccacaaggagcgcctcctctctctctttaaagataaagtcagtcacctccatgacacttttctgtcttgttcctttatttggggtcctagtgatgagaatgtgagggacacggttgaagtagtgggctcagcaaaggcggtgaaaccccggcaatttcatgcacctccgaatcttttgctttgtgttctccaagcttatgggacctcggatttaccattgtctctttgttcaaatcaaggtgcttggaccttgattggcaatttatgtccggaacctgtgtgtgagcaacattgtgtttcacaagccgaagagtccgggcttcctttcctggtacgaatggcaccaccaagcacaacatgctcaattgcttgtcatactcaaagttaggacattttgctgacagaataattatccagacagagcttttgaacccaatacaatacagacgacggaattatagcggcatcttaccgcttgaggctacgattgagggtgatgctcgaacgtgcaacaagctcccttgagaacgcgggacggcgtttccttcaagactccaatggtgtgatccgaaacggaagctgtctctctggtcatttttggaagcataccggcgttggagcgaatgctcctcagtggttcatcgcgcttttgcaggcgtcaggccaacgatcgtcccccgttcttagcactcaacacgaaagcagagagtcaagcgatgggataggcccatcactcgaattcttataccctcagcaggctcaaactttagtagcttcgcgtctgcctcgctcccaaaacaggactgggtttcggaggagacacttgagcttttcaaggtcttatgtttctctttcaagtctttgccaagctccatcagaggcttcatccaggcatgaatatgcaccaaagctggcccaagtacctcaaaatccagaatctctccataaggacggcgaagcgagcgcatccctccaggcgttccttcaggagaatggcagcgaatttgataaagcttgggtgctgtacgttgcagctggatgcccgtcgaaactcaagtctgcactctgtgcttatatgagtaaatcaccgaaaaaaaaggatcaacgccgagcatggacactcttcaacgaaatcgcacccaaagatcgcactgacttagacttcaagaacatcataaagtcacagattctgtcgctacccgagaatagaccccagcatttggaggagatctgccaggaagccatttccactccatttgcccaagaaatcatctcgctgggcctgatgcacatgatggcaaacagacagtggtctaaaattatctcactctggaagaagctattggcgacccgtgcgaatgagcgaccaccattggacttttttctagatcgatttgatcgatttcacttccctgattattccctttcgaggcatctccttgctttcactgcgcacctgataagtgccggcacggttagtgcagcagcaaatgactttttgcgccgtctaattgagcgatttattagctctgatgacatggtcatatccacaccgattccgactttgcttgaactgttgcacaaatgccgtcctcttagtctcccgaccacaagacactatttcaatttgatacaagtcttcctacaatcagagcagaggccggaattagtcaagtgcattcttgtttaccgctactttcgttcaagatttccggatgaaaggatgcacctcaccactattcgtgctattactcaacgcgtggtgaaattcaagatgaccgacagcatgctatattttttggacgaagaggcgcactttgatgaaaataaaagaccaagcatgttgtcgtacaatgaagccatgagtgcattttcacggattggggatgtacgaactgtccaacacctgtttgataggttcctggcagatcacggccacccaaagtttcatgggtcggtgaccccccttcttgctgttcacgcgcggttaggtgatgtgcgcgagacacggcgacaattcgagcgaattcctacagaatttggtctcccggtgaacacaatttgctggaatatactgcttctggcgtacactactgccaaggatttatcgggtgctctttctctattctcagaaatgcgagaaaataaagtacccttcaactcgtacacatttggcacactgatggcgattttcgcccagcgaggcgacgtcgaagcaatccgtcaattgctcaaagaggcgcagaaaagtcgagtacaaatcacgagaccaatgattgaaacggccgttcaagcatactgcaagaatgggcaattggcccatgcagaagagcttatcgcactgagctgggatttagcggtgggagggtctcccttgcgaatgtggaattttcttctaatgcggtatgcattcagggtatcaaagttttccttccgccgtgtccttgaccgcatgggacgcctaggattgaaaccggacgacatgacttacgcggctgttatgcttgcttatgtctatgctaagcaggtgaatcgtgcgcaagctaccctcaggaagatgcatgaagctggttttcaagtcaccgagcaccattattctattctcttgcttggatatgtgaaggaacggaaccgtgatatggtgtatgtcatctcccgcgaaatgcaaaaacgcttcggtcgaatcgggatggaggagagccttttgagcctgagaatgcagattgcgagagacgtggagactgcaaaggatctcgaaatccctattgaagatatcgtgttggagaacgcagaaaagacgcttgctgaatcaatctcacgattcaatgccaatccatcgccagccaacagtcgattatctagaccgttagagggctttgctgttgagtctttcactgccacgcactatcaacggctgatcgacgcatacggcatcgtaggtggtgccagaaaagcactcgaaacttttactcattacatgcaactcagacgaaccgcgggattatcggacggcgatgatttgaaatctttaccgattgacttcgtcaaagccgttatgaatgccttttcagaaacccagaactacgagaaagtggaagagtgctggaacagtattatcgcaaatgcaaacaaggcagccggtacctgcgaccttgacaaaatcttgtcagcaccgtcgccggagtcaacgctgccagcatcagatgtgtcctctctcccgtcaattttttcaatgtccactcaggcagaaaagcccaaaatcattcctgctcaacgcttcatcctggactatccactttcgctttacctgcagtcgttggctcgacgaggcatgttcgcgaaaatgcatcaagttgtagccgaagttcaggcagcaggctttgcattgactggtttcaactggtcaacttacgttaggacgcttgcgacatctgatcattatcctgacaatgtggaggcatttagacttttcgaagagaagttcattgttcatttccctggttggtcgtggtttctcaaaggatatggtgtgagaccacttaacgcccccgtgacaatcctccacctcgaaggtcgcgcgggtatcaccaaatctcgcaggatgatgggaaagttggcccgaaagcattggcgcaaaatcgaccccggttacatgcaccctcattaccccaccatggtgcaactagcgagcacattgcaacagctccggcaaaccagtattacggaggggaacgagcatctggccaatctctacaagattgcgccacagactgttgatgcccttgccgcgatgccaaccgtggctgataaatatcagggctccatacttcgcggcaaggcggcaaaacgcgatatcctcccacgcccaacccatctgtcctcctcgcactctggtgctcttggccccagtcgcgacatgcatgaacgcaccttcgatgacgcgactaaggaacctctcgtgttgagaaaagaccaacattccgagcccgctgtcaacaatttaaatcttactggcttactcgccgttcacgaagagggattattcggcccgttggcgagcatccttcctcgcgaggaccgagtcgacctggaaactacagttcacgagtatcgcgttacggcacaacagtggaaggaccgaatcaagcattaccacgaggttattgctatggcgctcaaagacagggatataccacgcgccgacgcccacaaacgacgtttggtcaagttgctatattccgacgtcaagagcccgaccgccaaacgacaactgttcgacaaggataatcgcaagtggaagctacaaacccctccctaccttatgttcaagcccattgccgggctccatgtaaaacctgggcggacgttagcgaagcgagcgtccgtgcgacaaagatacaagggaccctggacgcccagggaagaccagggcgacgaccgttgagcagcgtgctccattccatgtatagtgattgtaattttagcttgtttttatatatcatatttgtacaatacatcagaattttccacctttcattggacatcactggttgaatacctccaactacatagttaaaagtcttttgtaccctcctcttctaggacggagaggaagtagtattactaggccaaacgtccgtaatcacatgacaaggagtagctcggttatacatgttgatgtatgtacatctagtaaatattattgtcggacagttacaagcctataatttgtgagtagaatgatgcatttttcaccacggagtaggtaaacaagaatttaagcattagaaagaagtatggctagcagaaaattcaagaaatagcagaaagccgatacttaagatctcgggcagggtacaatcccctaatgtataggctatatcaatcccccagatctatgtctacttgattgaaaaataatgatatggtggagacaaaggtacacatctgaaggtaccttttgtatgcgcatccaatagaaaaggtacatcttgcatcagacccatgagcccgaactcccagaggagttgagcaggatgttgggccaagtgtttattttgacgtgggatacagagtatagaaaactaataaatatcgttttgaaggggaatttgaatagtgagattattttcagatagctataaaaaaaaaaaaaggccaacacacagcgctccataccatcaaccgaatggaagaggacctttcagacctcctcgacacccaccaggaccgaccgaccgaagtcagacgtcgagaccaggtcaagatcatcaccactccctagaccgaaacacagacactgcgaacagcacgcgtgacagtcgaggcgggagtaaaaaggtttcactttagggcatcgaggacatgtagtcatcagcaagggtggagattctgtggctcttttaaagagtttagaaaggggacgtctactctaaagtgattctttgaactgtgaaaaggtcagcaaaatgttcgatcacagtgaaaaaatggttttctgctgtatgggggggaagaacatacgtagagtcgcttgaaaaagagaagaaggtctgggggcttgggcttctttatattcctgccgggcacgctagtgctaagcgagattgtcgtgtatttgtctggtttgtctggtttgctttgtagaggaaaggaatgttagcaaaaagttcaaaatgccatgtccagtgaggaaaaccagaaggtttcctgctgttgggggggaggagaacgcacgtagagtcgcttgaagaaaagaaaagggaccggggggatggcggcttatatagcccagtgaaaaattattttctgactcagcacggcacgtggtacccgggggacgcgctttcctcgcgtgcaacttcacgcgttccactttagcaaatcgggaaatcccaatcggccctccactccctccttcctaccacactatattgcatcacacaccatggacggtttacaactacgtgatgaggccgcgcaggatcgcgttcgtgctgcaactgaatttcttgaccctagtaagtccattgagttatgtgttgtgatcccttgagctaacaaagttctttttttcagatgatgcacgggcacgcaggttcgtcgacctcgaagataaatgtgaaatatatatctaacgggctggaacagttatcgagcggacattgtggttatgctgaacaagggtgcgcgacgattgacagtgcgtggatctgcgaaattccctgctagtaggtgatgctgatgattttggacaggtcagcatcgatgatatcagagcacataatcgggagcttgccgatgggtaaattgttcctcgacaccaaccgaaaccgggttcaccgactaacgggtataggctcctctcttcgccgttcgattattcacaagcctttgatgcagctttgaaggcggtcgttaaaaccctacccggtcgaccactcaaagaatcttcagatgaagcggtgtgtattaggttctcaatgattcttagcagacatggaacgtctaacaatatcaatagaactactactgcgcttatgttggtgcattcggagaattctcttgcaatccgcgcacattgggctcggaacaattgaaccacatggtctcgctcgagggaattgtgacaaaatgctctctggtacgccccaagattattcaaagtgtccactacgtcgagagaaaggatcggtttgtcgccagaaaatatcgtgatcaaactatgagtgccagcggcgcaactagtttgaacgtttacccccaagaagacgacgaaaagaatccggtgagtttagcctggacaatctcactcaatcagttgaaactaatgatagaatatctagcttattacggagtacggctactcaacatatctcgaccatcagtcgatctctatccaagaaatgcccgaacgtgccccggcaggacaattgccccgaagtgtcgatgttatcttggacgacgacctcgtcgacactgccaagcctggtgatagaatccagttggtaggtatctaccgtaccctcggcaacggaggtagtggctcgtcgacgttccgtacagttgtcatggcgaacaacattgttcagttgtcctcgaagagcggtggaggtattgcggaggctgtgcttacggataccgatattcgaaacatcaatcagattgccaagaagaagaacgtgtttgacttgttgtccaagtctctggctcccagtatttacgggcatgaccacatcaagaaagccatcctcctgatgcttctaggtggaatggagaagaacttggataacggaacccatcttcgtggtgatatcaacattcttatggttggtgatccgtccactgcgaaatcccagcttcttcgtttcgtattgaacaccgcgccactggcaatcgcgactaccggtcgaggttcctccggtgtcggtttgactgctgctgtcacctcggacaaggaaaccggcgaacgtcgattagaggctggtgctatggttctcggtgaccgtggtgtggtgtgtattgatgaattcgacaagatgagtgatgtcgatcgtgtcgccatccacgaagtcatggaacagcagaccgtgacaattgccaaagccggtatccacacaagcttgaacgctcgctgcagtgtccttgcagcagccaacccgatttatggccaatatgatccccacaaggacccgcataagaacattgctctccccgactctttgctttctcgtttcgatttgctatttgtcgtgaccgatgatattgaggatgctcatgaccgaataatctcagagcacgttctacgcatgcatcgctaccgccagcctggcactgaggagggtgcacccgttcgggaacagctcaatcaaacattgggcgtcggaaatgaagatcgtcaagactccaacgcgccaagtgaagtttttgagaagtttaatgtgatgctccacggtggtatggtcaacgctaccaatgctggccgccgccgtggcaaggatgtggaaattattagtattcccttcctcaagaagtatatccaatacgccaagaagcgaatcatgcccgtcttgaccaggggtgctgccaaccacgttatcgctgcatactctgctctgcgaaacgatgaactcaccggcaacaagcgtcgcacatcgcccatcacccctcgtaccctggagacactgattcgtttgtctactgcacacgccaaagctcgcctgtctaatcgagttgaggagaaggatgctaaacatgccgaggccatcctgcgcttcgccatgtttaaggaagtagtcgaggatgagcgccggaaaagacgcaaggtgaccaccttcgatgattcctctgacgacagcgatgctgaactcgacgacaactctgatgatgacgccaccgcccgcggcacctcaaccgccacaccgggtagacgtactggcacagcacgcacccgcggtatcgcaacgcaatctagtggtcctgtcccagacgaagacgaagacccagacagcctatacacagccagccctcgcgctcaacgcttgcgttcgagccagacagctcgcactcaaacccaaaccgactctcagatgtcaatggcatcctcaaagccagcctcgcaactcatcgagtcccagacagactcgcagtccacttccacagacgtcccgatcacccctgcccgcatgacagtgttccggcagactttgggcccgcttatgggcaagactgtgtttagagacagcgatacaagcaagattgatgagttgattaatgctgtaaataccgccatccgggaatcgcctcagcttggcgcttcgcacgtcttctcccgccctgaggctatccaggccttgcgagtcatgaatgacgacaatatcctgatgtatctcgaggatgatgaagatgtgtaccgggtctaatttacctgggttatgtggcactgtctatacttctcttctccatctggtaatagccagggggagaatgctggatctgtctgcgtccagttttacgagcatgctttcttgcctttgcattgggattgatatcagcatgttttgttttattttgtgtttggcgtatgggatgggtttgtgaggaaatactactgggtgggctcaatacgagaaatatgaatgaatactcgatccttgacttaaatcaagacctgaatggtagtactaggctcttagtccacctgcaattgtaatttaatgccacgctatgtgatttattagcagacacttgtttatttgacactataagatgcattggaatgggagttttccaaaggaaccagatacaacgcgacagcatacataggcgaggtactcgagcatgtctatagaagtaacgacatcgcgctctaaaggatatgcagcatacacagctaatgcaagttcccaaagacaacgctttgagcaacaatgtctggaaaacacgagagacaaaaaacagggtatagagatataaatggcggaagcatgaataatattccgtgctaaggtgcggtgcagtattacaattccggaacagaattcggtatagcctcctctttatctttctcaagcatacccataggcaacacagagtcgtcagacgagaaggacggggtacgtataccctctctgatctgcgcctgcgtgagaggtgacaagccccgccgaagcgtcgagcccttccgtttttgctgctgcgggctcgcatcctgcccggaggcggtgctcccgcggcggggcctactggaaggggaagagcgggaggggggacggtcttcgaagctcgtgtcgacgggggtagtgctgcgggatgacgtgcgggaatgagactcggagcgggtattgcgacgggagggaccccgctgctcttggccgagtttcgtgatgggatgatggccgtggcctgggcggtgttttgattcttgctcgagtgagcggtgcagggtccctgcgacgaggcggcgacgttgggaggcgcgccagccaagcccgagccggccgagccagcctccttctgtttgggcgaggtggcgctcgcgctcgcgcagtttgaggcgtagctgggcgcggcgctcgttttccttttcccagaagtcagtgcggtaatcgtcccagttttcgcggaattctggggagaacgacttgggcaggaggaggagacgaatgtagtcgcctcccgggctgaggtcttcttctaccatgccggactcgctgtcggtgccgttgtagtactgttgatagtgctgccgaccaccaccagcgcgcttatcggaggggctctgctcaacgaaatggtagtttccattgggggagggtaagaacggggcggagaatgggaacaggaatgagatgtaagacagtagctcttgccagaaggggccgcgaatgataattatcttggtgttcatcacgcgcaggccacgattggagacagcgagccagcgccgaggccatctgatccctcgttcccactgccctgtaccccagatgagcagtgcggtaaccaccccgccaagcagggcgactttctcccccatctctaccacccagtagacagagccgcctaccccgcggccatcttctcgcgggcgaaggaaaagggcatatgcaaaatgggcaagccaagcggctagtagaagtaggaagaacgtgttctggcggcgacgctcgcgcagggccagatattgggctcgtagcgaggtttcaagtattaagaggtttaggtagatctggggcggggaggatggcaggtgtgccagcgggtctggggtcgacggacgtggaggggaggaatctgaacggtgagcttgagacgaccttgaggagttcaacggctctggagttgatggggcgctcgcgccgggtgttggggcacccttgaccacctggtctaagggtgaggccatagtagaagagtcccaagatgatagtagaatatgaaagcaaagctcgttggttaaagtcaaatcaaaacttggccgatccggcccagggcgagtgtcattagtgtcattgcatgtgaagaggagagagaaaggcgggagggtgaaagccaagttggatcgacatcatctgcccagttagttgacttcacttttatacctacacaaatattgcccattgccattaacttaaggggtttccaccatatttgtcttttcatcgactctcttccttcggatattacctcttttgcccggagtttcgcatgtcagacctaccggggttaagcggagtgaccgaattgtctccgcgttccctgcttatacgtccatgagcgccaccgttcaacttttgctagcagaaactatctgtcttcccaatttgcgaatcgcaggcacaacttcgcgacttgcttctctcttttcagccactcaacaccaggccaaaccttgctcagccgtcttcgccaccctcccacgggggcacagactgtcttcaatggcgtcagaatcactcaactcgtcccatgagaacgtccatgggcgcgatcaacacttaggtgaaagcaatatcgagagaactccgggaacgccatatgcggctcaggctgctgctggcgcggcagcggcgcgtgcatttttcccgttgggatatcgagaaggctttagtcaatgggtaagctaacaattcaaaagccttccattaccgcatgtctgctgatgatttgatttacatagtgggctcgtatacctgcagctactgccgaacacaaagtcctctcttatctgccttacttgcaccaccagccccccacccacctccagactggaaaaacggcagagcttccggatggcactatcccgaccagtctcgagagcgcagaccctaatcaactggatgaagtcaccactaactcccttgatgacccttatggccctcgccgctggcgctctagcatggtagaactgagcgggaaagaccgtgcgctcaatgagttctcggtggagagggttggcgaggaagcagaccaacatttggtcatgctccacggctatggcgccggactcggtttcttctataaaaacttcgaaccactgagtcggttgaagggctggcaactccacgccttggacatgctaggcatgggccggagtactcgaccctcattcaaaatcaaggcaaaggaaagagaagacgctatcagggaggctgaggcttggtttgtagatgccttggaggaatggcgcatcaaacgaaagatcgatcgctttaccttgcttggacacagtctcggcgggtacatggcggttgcctacgcgctgaaataccccgggcatctaaacaagcttatcctggcatctccagttggcatcccagaggacccatacgctgtcactgcagatgtggccgagcctcgggcatcgacattgtccaacgagcttactcaagacgagcgagatataacttcgtccatttcggaaacagcaccgaagacaaccgacggtagctttatcactgggcgccaaccactcccggctgattccgcaccacctccagctccacgacggaatctccctaagtggttcgcgtatttatgggatgccaatatctcgcccttcagtctggtgcggtgggctggtcctctaggcccacgtctcgtgtccggatggacctctcgtcgtttctcccacctaccagccgaggaagctaaggcactccacgactactcgtactcgatcttcagtcttcgtggtagcggcgagtatgcgctagcatacattcttgcccccggtgctttcgctcgtagtcctctgatccaccgtgttcacggcctcgggagacaactgatccaaaacacaagcccccttgctcatccagccgccgccgccaccacttcgtcagcgccctctgagaatacgaccgcctctaccgccactccttcgtccgactcttcggcacctgctcggcgcgagaagggtctccctgtggtgttcatgtatggcgaccacgactggatggatgtctcaggtggtcgtgcagcagcagctatattggaaaaagaaaagcggaaagccctagaaaatgccaccccagaggagaagcgtaccgacgaaggttcctctaaggtggtcgttgtgaataaagctggccaccatttgtatctcgatggctgggaggagttcaatgatattgtgctcaccgagatggaagaggtcaaccagagggagagaagtcgtcagtaatgacgtggataaggcttctttccctttgtcgtgaacaacgacctattaaatttagagctggagtgtgatgttaaccttcgtccctcgtttattgtggtatttaatctctcttttgcccctcgtgttatgtgcctatctccctcttttccgtggctataattctgtacggtgcatattgactagatagacttggacagaataaatgacacttgccatgaatgctccagtcggagaaacagctttcatgcatttttcatttgtgctctttgcgcctcccccccccaaaagaaaacacacttcattcagctcgatcaccagcagtcagccctctcgaattcagtccaggggtactttgtctccgatgcctagggctagtgggataatgtgccatcaagcgtgctagccccaccgatggagcatcacgctcttccgtcgacagaccaatcccgggagtagtatacccactagcattgggactaaccctgccggagagaatatggctgctagaggacccagggcgcctcaaagaaaagtacccacccccgccaaagctcccgccactactattgctcccgaagctgtgacccagcccatccccagaggtggagagatatgagctcgtgaatggtgcatcgctggcagggaaggcgcgcgggagagcccccgactgagaatacgagtttgaatccagccgcaggtatggctggggcgtcataaacggagcattgagtcgcgctgttggtgacatcatcgactggctgtactccctcgaattaacagcggcggtatcaggcctgtttgacagcgctagggagagtcccatgcccgtgcgacggtcagaggtcgttagcgatgaagtagtgagcgaacggcggtggtgtcttgacccgtcttgttgctgatcggggtagatgccctgcgaggcccttgctcccgtcggcgattggagattgcttcggccattacgccagtcggtgctttcggggctgtttagggtgctttcggcgtggacacttgtacataacatgacgagttgcgaggggagctcgagacggttatttagagatagccaggctcgttcgtctgcatcaatgtctgcgtctagattgatgtcaccggtgctatgtatcgaagaggacgaggccgagcttgtcgctttcccgtgcagagtatgcgagctgcgtgttttggatgcagggtatgagcgccatccaccgacgccttcgaagtctcgcctttcatcgccgcttacaggcaggccgcagatgggcgttggggtagacaagttgtgggcctcgatcatgctccgtgcataagagttccttttgcggttttctgggtcatctaaactgctaccaatggaccaagaagtaagagggtcatttatctttcgtggatgtgtcgtcatttggctggagttccttcttgatctactactagctggagtagtaggttctgatgccgcaaatgtcaataatgatgaggtaggtgaggttggcactgaaaagaaatgcatgaacaattcgtagaatagctcaatacagactactgatagtctgagtatcaatgcaaagagcgcagcggatattgtaacccatgctgagaaaatgagtgggatagagatgatggccaggacaggcagcgcaagcaatgttgatagagagggccacatcgaggagtcaatctatatctccaggaagtggggaaaagaccaaaagcccatgattatacgacattcggtatttaagaccacagtcatagcataaacaacaaattgcggagaaagcatgtgatggatgccccaggcagcacaaacgccaattacatcatttcgctaacttcaaccttgttgtatatcagaaacttagaatctagctttggaggccttgttctggtttccattgaatagcccgagacatgccagaggatgagccgttcccttgggacattggcgtttacgatgcccactgtcaccccaccgacacattggcctcagtggccgacatcccgcaaatgaaagcgacaacactgacaatcatggccacgcgcggggaagatcaagatctcgtacaacaaacagccgtgtcactgtcagccaagacaagccaatcaatggcagaccgcgtagttccctgtttcggatggcatccgtggttctcgcaccagattttagacgacactacacaaccaacagctgcacaaaacccagccgagcacaagtccacgcactatgccgccgtgctagcaccatccccagccgatgaccaaccatttgttgatttacttcctgttcctaagcccctctcagaactaatatctgaaactcggaaccgcctccaacagttccccaatgcgctagtcggcgaagtcggcctggacaggtcattccgacttccgagcccatggactccaaccgacatcgataacagagatgaccagcttacccccggctcacgagaaggccggcgtctctcaaactaccgcgtcaagccggaacaccagcgcactgtactgaaagcgcagctacagctagcgggagaaatgaaccgtgccgtctcgctgcacagcgtgcaagcccatggcggagtctttgaagtgcttaaggagctctgggcaggacatgaacgggttatgctgtcgcgacggaagagggacaagcagcgggatgcagaaggcgccgtgtctgacgacgatgatgatgacaatgacggagataagacgttggaaggatgtgtgtcgactaaagcatctattcccaaagggaaatcgtatcggccgtttccgcctcgcatctgcatgcactcgtacaccggttcggttgagcccattcgccagttcctgcatcagtcgaatccgtcggatgtttatttctctttctcgaaacttatcaatttctccggtgctgctgagaagaaggttggtgatgttatcaaggctttgcctgaggatcgcattcttatcgaaagtgatctccatgttgcaggcgcgcagatggatgagttgcttgaggatgtggcccgacaggtttgtcagctacgtggatgggagttgcggcatggtgtacaggtgcttgcagataactggcggcggtttgtgtttggctaggtcttgcgtttcattttcctattcctgcatgggttgagcatgggttgaatttctgacttgttgcactttcccctcgcggtttttctaagcggtgcaattagcgaacacgcatatatggcgcgactggatcgctcttgtacgtatatccatggatattgcctaggtaattcattgagacataaaaaggccccaactgatttgacccaacatcactatttgcagttatatgacgtggtatatctctatcattgtatgtgattgtttgtgacatggtatcgtaggctgggcctgtacatgtctgtggcctgacatggtctctaagatgtatcgtgtagctgcgtgccctggcatggctcgtctcgtcgtcaaattagaaaaggtatccgaagagtaggcgatggagaagatgacagctctatatatatagtcatcaaccagaggtagcgggaaaaagctaattatgcagccatcctccatcgtgaataagatctgccatcggggcatcctgccagtagatctgccgccattcatcttcaagctcgggcaaaccttcaacgcccacagggggaggtaggtctacatcaccgaaggcgaacagctgtcgccagtccggatagtcgcgagctggctcgatggaatccacttgcatgctggctgaaaaaggatcgttcctttccagcgggccaacattaagccggagaggggcaatccaattattaaattgagggttgggttgtggtgagagagtcgtttgttggagaggggtagattcgggggtgggcaccccgaaagagagtggcccgggggtttgcatggtaattgatggaacaggagaggtaatgggcatcttgtgcgcattatgagtgtcgttgaacggcttgggtcgttctgtggttgccatccgaagatcctcttgcagacgtttggagtcctcgaagagtcgcaggattgtaccagcatgaacccagtattgagctaattcgcgcagcgagtaagaggcagaatcgaagcggcgtaaggcattgatggcaagaactggattggagaagcggagctcaacccggacttgaatcatggccgtgaagagggtatggacgccagtgtaccaaaggaacttcaagcgctcgtgcatcctgagctcttcaaatattgaggctataacccctgcggctgcactgcaaatttctgcatcgtgagggccatagtcatcagaataggccgaggctctgggatgaggccgatgcaacagaatgaggaagttgttgtaggtcaaatggagcatagcggaccaaggatccatatcagatgcgcgaagccgaagattatcaggaagtttcagagaccaggttgccaatgacccatcagcttcttgaagaacggcctttcgccgttctttactttcccgnnnnnnnnnnnnnnnnnnnnnnnnnnnnnnnnnnnnnnnnnnnnnnnnnnnnnnnnnnnnnnnnnnnnnnnnnnnnnnnnnnnnnnnnnnnnnnnnnnnnnnnnnnnnnnnnnnnnnnnnnnnnnnnnnnnnnnnnnnnnnnnnnnnnnnnnnnnnnnnnnnnnngaacggcctttcgccgttcttcacttgcccgaagtccaaatcgatcgcgaatgagatacgagatcatcgtacacagttcggtaaaatggatcacgtagtctgcttgtacaagaggaccgcaattctcaaaatcagcgagcgtcaaaggagacacatcagaatcgtctagattgctaaattgaaagttgattagtattcgctgcaatttggccgtttggaacgacttacatcgcctgaggtcggccatatgacagggaaatcaacacatcaaattggaccagaatgaaccaaaccctccgccacattcgccgatcgcgagtcacaaatctactggaaacgggattacggtgcattccaagccccgtggcgatacgggcagcggccccaacccaaaagtgagcatctgcagcaacatcatcatctgcgctgtccgaatgccacgtcaaaagaagggccgcttgaacaagaatgtcgcgatttcgttcgatgcgattgtcaaacagatacttggtccgacggaagaaaatttctttgagagcgtctcgctctactttagcacgagaaacatgcgccccaactagcaaaatcgcttgaagaagtaggactggcggaggatctgcgggatcccggttccggtattgcgtcatgaataaatcttcgtcaatgatagggtaccccggattgacatatgtgaaataagcctggaccaattcatctgcgagagccggttctggaagtgttagagcatccataagaagctgatcatgaccggtcttcatttgacgccgtgggatctcgttgctcgcaaaatggtatacatcgtcatcttgttctcgttgttgtcgaaacaagaatgacatgttcgaatgttcgtgtccgacatagaaggcgcgcacgcctctttgtatctctctcctgccggattcctcctcgtctatcaatttaacgagatgttgctccatctccgtgtgtgcctcgcgggcatgcgccatatcggggcggccaaatgcctccgatcccgtgccttgctgaaatccatgttgcggaaggcccccagatattggtgtggcatggccgctctgaaatgcagttggaaaacttggtggtagtggtgtccccgctgcaagggtcgggtttgaagtaggatcggaggtgggtagaggccgagatcggatcggaacaggatctaggattgagcgtacagcaagacgctttttcttttcgtgtatgcgacagtcagcctttccagaggcgcgacagttggtacagggtgttccgacggtacgggcatcgcagcgaactttgcgccggtgacagtggacacaagctgcggagcctaagagttttttgagtcaccggtcagcaagtctgatcgcgcaaaaataaccgatcgccgagaacaaagaacaaagcccgcatatcaagatacataacgattaagcagataaggggcattgcttaccttgtttgcgcttgctcaccccatctaccgggagcggcgagggggcgttatcgttgacggaggacatgacaggagtaccattggcatcattcttccaaatcggccacgattctgcattattcgagtcaccaacaccagtcacttcaaggcatcatgggcgaacttcgaaatggttgccgaggataatgcgacaaacaactaaatcaagaaacaaaaaagtcgggaagttgaggaaactgcgggatcggggtctccggtggagactcacgtgggtgcggagaaggcgattatgtaaaaaatgggccaaatcttggaaatcgtatcacaaggtcatattcctccttgggagttgcattattgcatttgatatatcgtgttctccgttaatgcaaggatgtcttcatcttttcttaggatatcgctttggtggcctggatactactgttattccttcggcccacgatgtacatatttgcgatacattacggtgagccacagcgtcgtaggcaagcccgtgctccatgtgctcttcttgaccagatgaccaagagacactccacatctatcgcagcaatccaacattaaccaaaagaattattcaaggattcagcaatacccacttggaacaacatctctcccgtcctaacggagcaaacctggacggtagctgttattctggtggaggtcttcgtctatctctggctatctctgatacgcagagcctcaatgaatgtctaagccacatacccgatcagtctataaaccaggcacatcaagatgaacaataaaccagatgaacatattccctaaacagaacacctatcttaacctctggcttcaattcaagaatgggaaaggaaacaaacgagttcaagcgatcgagcaaaaatatctgtagatctctcacaccgacccccttttatccaagtattttccaacggttttagatctagccaatgaatgctactagggatcggacagcaatgcattcattatacggagtacggaatacaacatacggcctagcaaaacagataggaaagaaagaagaatatacatacggagtgggtcctatcacctactattggtgcgccacaacactagatgtgccctaactcgaacccctgaagatctacgaggctcgtacaacatacggagtatatcggcttcacttccttccggttgctgatctctaccattattgatctctgggctgacatcttcctcgggaacttaaacaagaggccttcatatacaattgtactatgtactgactggatcaatagggcagcattttacgcacggactttatgccagctcagctcttggctgccggcacttgatttaggatttgagatatttgcccaatactaattctcagaaaaggaattagattcataagcggtagtatcatactccgtacaccgtatcccctgttcgctctaattgtgaaggggtatttatctataaggctcttttgaagactggcatgtatgtcataaaagctaatcaggtccaaaactcaaagcagcgtcttgagtgtatgttgtaccgaggcatttcgacctacttgagttgcgcccaagctattcccaaaaatggcgaggctggcagccccatcgggttgcgaaagcttctcgttcttggccattaattacctctggacaacacccctgtgatctacgtacacaaatatgagaatggatacatcaaatgttgtataactacggagtactactacggattatgcactccgtatgagtacataactagttacagagcttagcgaattcctggcttagctgaacagatgatattactgatgatcgtgatggatataacgcgtaaatactgttggactgagtgttctatcttcacttcatatgagaaatggcacttctctgtgtgtatgaatgggctgacatttggtgcactatcactttggatcctcgtccattttccagcttgagtgctatttgatctcaagctgccggatcgcttacgggcgatattttctcagaacctattcactttgatacttccagacaatgcttccaaaattatgtatatagcatgagcacaccaaagagacactagtattgaacaataccattaagtctagcttgtccttccagacctgccttcataatcataccgaagatctccagatctttcctagcatccttcgaagtggttttagcgggcttaccatcaacagcaaatgcataaagctccttcatttccaatgtataagcatcttcgtacgtcttccgaaccacagactcacgaaatgagccatcttccagcttctcgcgaatgtgcatagtggtaggcaaccccttgacgtaaggcgaatcaaagcagaccttgacagtcttatgtccaccaaagacctcaatcgacgcatcgaaacgggggacatcatcaattccggactcataagacacagcaaaagagggatattggaagagggcactggagagggaaaagaattagcatgtttcccggagctgtagatataaaatttgcaacttacctccagaatgggggtcccttcgcagagcatagagaagcaccaagcacagccgtcggcataccaagagcctctctcattgcactaagatcatgcgagccaagacttcccaagtgcctccactgagcagcagtatcaggcgtaactggaatccccaattccgccgtcaaagcctgttcaaggaactcgtccgtcctcgtcgacaattccttcacgtcctctgatctgtaatcagagaaaaccttaggaaacgtaccagactgaccaacgaagtccgagttcgggccgacaatatctcgcacccgtgcatagcacacttgatcaaagcttcctatctccttgacggcatcgatgaagccactcgcataccgccgcatatatcccaccatgacctttccggaagtttgcttctcaagctcgatgagctggtccgcgtcttgcagagagagggccacgggcttctcgacgaagacgactttgtcatgtttcaggcctagtacggcgtggggaacgtggaaggcgtcgctgttggcaatcatcacaatgtccacgtccggggaggcgcagagctcctctgccttgcgagtcgtcttggggatacatccaatgaccttcttggcacagtgctcgagcgcattgtcggagacatcacataggtaggtgacttggaagtaatctgagaggaacccgagagttggaatgtgggcaacttgggtgatttcgccacatctagttggaatatcagcatcaatatggtacagcactttggcaataggcttcttacccaattattcctacgcggaggatccttttgccggtgttcatcttgaatgtgtgaggtgattcccagcttccccaatgacgtaatggttagggaaccttggaggttccaaggttgaaagctgattcaaacaaaagttcaaaaatttttgtgaacaaccaatatatcaggttggatgtctcgaatgtttcgaatgtttcgagtgaatatgctgggtaagttgaattgaagaagcgctgatctgatgccgcgaggtggaacagccccgccgaactttgctctcagacgctttttattagcacattggttgaatacgaataacatcaacactaagttcttgacaataagacatgtagtagacaagcaatcttgaatttactcaattagaatgtacaattgtagacttgtcttggtcctatactagacgccctggcagatcaaacccactaacttcaatacgtacttgttaggagtcaacttttggagacaaagcacaagtaaacatatcaatttcttgaaaaaggattaccttgaagcagacaaaaggtgagcatcaatcaaatctcaaaaaaacatgacctatcagcataatgacactggtcatcacagatctagaagctaggtgttatgatatacaacctcggtcatttgttgtcaagtcaggatcaaggccaacatccataagtatcttaagcctacatcgatgtacatgcatatctagctgtgtatgaaatttaaatcgttgaaatattgactagatggtgttagttaaccatcaattatggctttcttcaagtcgtcctgggctgatacctgcaaaacccaagactctgtcatctgccatcactgagctttgaggaacccagccgaaacactcaagattgggaacttatgggtatatctcttttactatgataaggagctaatcttgcaattttgacttcgaagcacacaccgacgatgcattatgtcttttgccgttcccagtaacgccggtaacctattgctctcacacgcagatagctacacccaggaacatgtaacttgaaagtatacaaagaaaaggaatgccactaaggctgcacaacctgaatgttgtttttcttctgcaaagtgggagatcaaagttagtattccgtatcaagtttccagaatatggtttcaggcttagaaatagccatgaaacaggggatgcgattaccttccaggtatccagctcatcctgctttgatttgtactgcttgagcatgtcctcaatcacttgtctcaacccgtccgagttggtcttgagtgtaggaagcacatctttgacagtgcgctcaactaaaacgccattcaccaggcgaaaacatttgcggtctgcggcaagagggtcgagggtttcaatcacaagtctaaaaaaaaatagatgttagcattgtacatatccgttgagacatctctggttgtgctcgctcgtggtgaactccccgattcatatcagcgagaccatgctgggatagcgcataaccctggaagtaactcacttgtgttcttctgcttcctgctcaatatcaccgatcttttgcgctaattgctgaagggtatttttgaagttggtgtattggtgctgaagctctagattgagggggttcgcatcagctttcgtgaactcttgaggtctgcaggggcaatagaaaaaccataccttgctgcttcttagggtcaatctgtttctggctagacatgatggctgtttgatatggcgtggtcggcacaaggaagcttgagaaattgggatgacgatgcggggcggttactttttggtgttggtggaagccactactatggaactttatgcacctcacaccctacataggcactttagctcagaatctcatatatgtatgctcaaatacccaagacaactccaatatcattaacagaattcttggtttaactctatactaccaattatatgctcttcatgaactaagttatataccacgtgactaatattgcagtgcagtgacaagtcgatcagctcgactccaccgtcctctaaaaaaaggttgcctcgggtcagcaaagctgcaaataagctgtctcctcgagaatcagaagctaaacactgctaatgacattgccatttcagaagattgcctaggtgactaccagggcggtgactcttctctggcaataaagggcggtaagaagataggaaagagcttcgactccgcggatcactttctcaagtcaacctcacgcagaccacaccgagtcgtacattgcgaataactcaagtctgaaacctggctcaccagcccggctgaacgacatgtctcgcaacgagatgggccctccggccaaaaggcacaagggctttggacacctccctgcaggcctgcgcgacgcaaaacggaaggacattgacaattgggaaaccaatcgaatgcttacttctggtgtagcgcaacgacgagaccatgagggcgacttcatgcccgaagatgaagaagcgactcgcgtgcatttactcgtccacgatctcaggccgccttttctcgacggtcgtacgatcttcacgaagcaactggagccgatctccgctgttcgagatccgcaaagtgacatggcggtattcagtcggaaaggaagcagggtcgttaatgagcgccggcagcagcgagaacgacaaaagcaagcacaggaggcgacaaatatggccggcacagctctggggaacttcatgggcatcaaagaggacgaaggagacagcgctgtcgctgtgcccatcgaggatacctacaaaggaggaggaaacaaatttgccagacatatgaagaaagacggtggctctagcgctttcagcaatagcaagaccatgcgcgaacagagagagtatctgcccgcctttgccgtgcgagaggatcttatgagagtcattcgggataaccaagttgtggtggtcgttggagagaccggatctgggaaaaccacccagctaactcaatttctacacgaggatggctattctaagttcggtatgatcggatgcacgcagcctcgccgtgtagctgctatgagtgtcgctaagcgagtcagcgaggagatggacgtcgagctcggtggactcgtcggatacgctatccgtttcgaggattgtacgagtgacgacacgttgatcaaatgtgagtttcttctttccgctttggtgtgatcatatagctaatttatgtactagacatgacggatggtgtattgctgcgagagtctctcacccaaaaggatctcgacaaatactcatgtatcattatggacgaggcacacgaaagagccttgaacactgacgtcttgatgggtctccttaaaaaagtcctgacccgccgcagggatctgaaattgatcgtgacctcagcaacaatgaactctgaacgattttcgcgcttctttggcggtgccgcagaattcgtcattcccggcagaaccttccctgttgatcttcacttctcgcgcacaccctgtgaagattatgtcgatagtgcggtcaagcaggtcttggccattcatgtgtctcagggcgctggtgatattcttgtcttcatgactggccaagaagatatcgaggcaacctacgagctggttgaagaaaggctgaagcagctgaatgatccgccgaaactcagcgttctacccatctacagtcaaatgccggccgagcaacaggcaaagatctttgagaaggccgccccgggcgtgcgcaaagtaattgtggctacaaatattgctgagacaagtctaacggtcgacggtatcatgttcgttgtggatgcaggttactcaaagctgaaagtgtacaacccgcgcatgggtatggactctctccaggtcaccccgatttcccaagccaatgcaaaccagcgatctggacgtgctgggcggactggaccgggcaaggcctatcgtctatatacggaaacagcctacaagaacgagctttacattcaaaccatccctgagattcagcgaaccagtcttgccaataccatactgttactgaaatcccttggtgtgaaggaccttttggacttcgacttcatggatcctcccccacaagagacaatctctacctctcttttcgagctctggtcgctgggtgctctggacaacctgggtgatcttacatctctaggacgtcgcatgacaccattccccatggatccccctcttgccaagctcataatcatggcctccgatgtatacgagtgcagcgaagaaatgttaaccatcgtcgcaatgctttcggttgcaaatgtcttttatcgtcccaaagaacgacaggaggaagccgattcagcccacgagaaattcttcgttccagaatccgatcacttgacccttctccacgtttatactcaatggaaaaccaacggtcactcagatgcctggtgcatcaagcactttttgcactccaaaacgctccgccgcgccaaggaagtccgagaccaacttcacgacataatgatccaacaaaaaatgcccctcgtcagctgcggtacagactgggacttgatccgcaagtgcatctgttcgggcttcttccatcaagccgcaaaactaaagggcattggcgagttcattaacctccgcaccagcgtgactatggcgctccatcccaccagtgccctttacggtatcggccaagtgcccgagtacgtcgtctaccacgagttaatcctgacgtccaaggaatacatgtccacagtgacagccgttgaccctcatgtaagttaccactcccccattcatgcctgcttgtcatctagtactcaactaactcgtttctctcagtggctcgccgaactcggtggcgtattctactccgttaaagaaaaaggctactcgcagcgcgaccgccgcgtgacagaaatcgagttcaacaagcgcatggaaatcgaagagcagatggcagctgaccgtgaacgtgctgctgccgagaaattgcgcgagcaggaacgcaacgacccagcccgccgcagaacggaaatcgaggttggcggaaagtccgtcgtgcgtaaagctatcatcaagccaggacgcagggtcggcggtttgactgcttcatcttcatcttcctcgcgacctggagccaatatcgatggcgctcatgatggaggtggaaatcgtcccggaagcagtgtggtcaagaggcctacggtgcctcggagaccaggacgtgcattctagtcttggtcttggagtgaaagtcacaatttctgtcccctaataccccgatagatgtgctgtgcttgaagatccgtacgcctcacgtccactctcttctttcctctgcctgaaatcctttaggattttccaaatatattgacctacggtcttacgtgttgatcttgaatcacatttacgaatatcttacgacgtggaacgatgcgactaagctagtttggattgtgctattatgacaatccagccagctaagttgctgctagtcagttctagcaataaaagaatagagacagttctctgatttttttgagtgtatactcatttccctatgtaatcctaagttatcacgtagtatctaatagagaagctcttagagcttgtattcagcttgcttttggagcttgcttctgcgaaatatacttctaggcaggatctttgtcgtcatcacttgtgatatacttactttctctaatactccctttatcgtttgcattataatataacaattagtctaatattcgtttcttcttttacatccatctacatggaatttgttcaatcgatacccgatattgagttatcattcagctcccttccgagtacgctctgctctttacacccagctttctccgaggtagggccatatgaatagcatacgcttatccaacaagtcagccttgtgtaagcagataggtcaaatatgaataaaattttccacttcgatcaaagaccagcgtgaagaaccagaacaaggatcggctaaaaaaggtgcaacatggaaggatatctaagagacgacattccccatcccatcgggggatcaaaacgaattaaacccagacaggaaacagaatgagccagcatggtacatattgaacagaggcttttagcaccgggcacaactcagttgataaagttgacacagaaaaagtgtaggatcaagcttccgaagatgtaatcggcgaaggccctggaattaaagatcagcatatgcatccatcgtggccttggaaaaacaatcgtgaagctggatcaccacaaaaaacacaaaagacaaaaaggaactcacctttcatgtgaaatacccgtcccctgttcttcactctcatctacaaagcgcgcattcttccccttagagctcggctttgatccagaaccagtaccgctgtcactagtttgcatgcgcagacttgccgtaaggacgaattgaccaacagcagcactaaagccactgaggaaggcattgaagggctatatgggagggaacagttgttagttattggtatataaatttccaattgcaaatcacatgccgtatagacaagacaagggaaaagagggtgaagaaaagcaatagaaacggaatggtatttgcacttacatagttcccagctacaacacagtacacaaactgcaatccaccaacaagaaccaggaatgccatgaaggcatctaggaggagtgtccgctgcggcgttgtagatgcatactgctgccagacatgggtagcaatttcagcggctgaggcattggtcttgagggttgttgggcctgaggagagcttcggtgttgtgagtgcgggtgtgggcgtgggcgtggaggatgccgcggaggtagttgaggccgcgtggcgcttgggagccatgattttgggattagacggatcggtagtacttggttatgtggagttgtcgttgaatagattatagatatcaccgatgaagattttactgcaaaattggtgcagggagggtgggttggaggacaatggcggagtggaaagtggtggttgatgccagcttggagcttgttatcaccgtagtcacgtggtggagtagatcccgatttggaagtatacaatcaagtgataacgaatagtctattttttcgatgatttaatggtaaattcattgactgaggtattgagattacgttttcgattaacggttgtgtaagatattggatgtacagtgttgccacaacacaacgtcgccgatataatgcgtaagagagaagaggaatataataacagtgaggggaggggatatcaataaccaacgccataaatcatcccatcattaatagaaaaggcctcaggtgagaaatgaactaccatatatcaagaggctaagcaaaccattcggcaacattaccgttggttggcagagaatcgtcattttcaacatccatctggaaatcacgcatgacttgatcccattcctcccagttgagctgagtggtgtcaggaaggggagcctcattcaagaatgggtttatcatggttgtgttgtagggaaggcttgtgggcaagctcggtgccgagatattattctgggccggtggagcatcgaatatatcgtttgaagtagctaggatgtttatgccagggaacatatttcgaagagcacccaatggtccattgctggggtcatagtctgtatcagatgctgttgagcctggccgatctatcgagggcgaatttggcatccctattggcatatgaatccgcggaagagtatgattatgattgatgctttgaataggctctgttgcggtggggaatggtccaaaactggatatcaattcttctttgtgcttggaccgggtggcagcagctcttttcatcaaggcggcgagcggccgccacagcatgcccttcttatgtgtggcctgcatggcccattccgtgtagatcgaactgacagcgctccaagctcgatcggtaatagggcaaattggtcgtacgcatacctcggacagaacaaatgcgattccatgccattgcatattggtccggaacagccagccccatttggcggtcttgagatcagtttcaagcaagtggccaaactcaaggacctcaattgcagtcagaaacaagctctctctcgttgcttgtgacacatttccacgctcttttcgggtcattgggtgatggacgatcagccataatttagcaaggatgagacgcccaactgtggcggtgcaccactgcaggggaatgttcatatcacagtgcttgatatatcgttgttcacatcgatcactgataatttgaatcatccgtccagcacgatctatgggcggtaaactgttaggtgaacgaaactgggctccggggcacacgtaatttgctctccgtaaagcgctcgttatctcacagcgaatgaggcagaatgtgacatccgtgaagccttctcgctccttggggggctcttccatgtcaggcgacaggtcgtcgtcattgagatttaatggcagtagagtatcgtacatgctctcgtgaatgagtgggtcggtcccatggtcttcagatgagcggacatccaatagtgaaatatgccaccataatcggcgccgcatctctgtttcatacggtttcagagcgaaattgctgccatctcggtgtaagcctaagctctgagcaaggcgtaatacaatcgatgtcatagaccacacaaatttgctatcatcttctcgtcgcacacagactaagaataagacagccgcttgcagaaggaccaagctttgtgtattcaagaacccggcttttgcaagcgcttgctctgtagcaaacctgtaccgcttgacagcaatagttcggtcttccccgaactggaaccaacagtcatcgggcttcatgctgacaatgctacaaaggtacatggaaaataccaatgcctctgaatttttgtccaaggcatcagggttccgtgctgcttgggaaaacaggtctctggcagtcggtcggtgtacgatggtgactaaaggagccacattttcctggtatgtttcccaaagtaaggagaccttgggcattggggggtgaaactctcgaagagactttgaaagcgagtagaatccaaaaaggaaaccgtcatgggaggccgactgagaagactctggtgaaggtgtatcatcttcccccgaggacgaatgatcaaggatatcctgcagctcctctatctaaaacatgttaatatgaagtacgtcgaggtagcaaaagaagatgagcgatatctacctcgtccccaagactagtccagagccgattgctgacatatcggctccggccttcatcaatgactaaccgcccaaattcattctcaaacttattgggagcgagtttcttcggatccgaagcttcgaacggacagtgacgtccgccgtcaacctggttttgtggctcagtcgaaacagacgtgggcgcagtcggctcgctccgaacggtcgaagatccagtcgtagaaggcggcgcctgagtcgaggtcgatccaccctctgtatcaccattgcccctaagatgatcaataacaccctccaaacgacgtaaccgcgaaagcaactccgcatccggtggacgtttcgatttccgcggggcacggccaggagggggaaaggtgcagtcgatgccggctttggtacagttcgaacacggggatcgcttgttgcagcggactttcctgcgacggcaggtcacacagctgcgagaggtcgagctcgggggttccgtagccgcatggcggggaaaggtggcggccaagttcggaggtagtggagtatttgaagaattataattgacgggaaagggattcaactcctctggggaagctggagggaatgacatcgcgctaaggtaaggactccagtctcgcttcccacattctttgaagtctagtggttctagcaagaaataactagcaaaaatacgaagattgtacggagtgatctcataggcatcaaattatcgcttagggccctggacgcatgtgactgattagagttccaaaggctatgactcagcgcccggtctggccccgtcccgttgaggccaaaggccgttatctccgtttgactccggactccggagatcgtatagatcgtgataagccttgagaataaatacatgcttagatagtggtatatgtacagcttctatcatcagatccaattcaaatataccgacgccagatatatgcaagaaatcaccacgcatactgaccgtcacgctgaaggtgagataaataagcacttatgcaagcaatgcgatcggtggtccgctcatgcttcgtctatgtgcgcaggagtgagtgtaggggtgttcatgggtaagttgttaccgcgtgagcctcgtcgaagcgagcgcttgaatttacgcctgtagagcatcagtcaaccatcgttagatatgatagttataaaactcacaccgcggactcccaaatcttggtctgttcattgaagatgtgactaggacagttagttacccaaactaacatccatagaatggaacaattcaggactcacccataaaagctcgttcgtgtaagtgcctttgggccatactcttcttcgaggagatatgtataagcgtatggaattttgaccggaacaccctcgaagagactgtcgcgcagcgggaagatgtcgctctcctatattacccgttagcgagactagacagacagcactaccagacaacttacctcatagtgatgtttatccttgcacattagcgcttccggatggccattcagccgcttagcctcatccttgcggacagcagtgatatcgatgaaaagaccagacgacatgtcaatccagcgggcatcaatcttattcaaagtgtctctctcggatttgacgacataatgaggattgatctcgagcatgtacgtacggccgccgtcgacgttaggaagatcgaaatgatgctctgtcatgttatagtaatccgccaagaaatgaatcgtcgcctccgagatctgcacatctagatcgtcgtcccatggaaacacctatacaactggttagggagtcaccttataattcgggatatccataatcccaccttctggttccaccaccaggccaagagagtcccatgcatgatccatgtctctgcaccgattgcgttcattgttgtgaaatatgtttggattagatccgagagatatgggatgacttttgtatctgggagactgccattggcgtatctgaaaagcgttaggcatcgcggttgggattgaaggatgagcgagcgtaccggccgtcataatgatgattgaatctgagtactgcggtttagttttgatcatatctggtacaattcccaggaagggagatgttcgacatactctgattcatctgtagggttcacgcgagtcagtaaagattcaaatcagagttccatggttcgtggccttataaaccaagcttggggttgtacacatcgacgaaaggattaaggattgcacttacgaaagtacttttctttcggtatcgcacgttcactcttatactcctttgttacattctttcgcacgctcatgaaattcggttctgtatctccgcagactccagaaatggtagtcgccaaaaggaatccatggagccacaagactctggtgactgcagagcgcattccgtactggagtttcatagaccccgacacttcatgctccggatctcaatatgtacaatgagcctagagattgtgcgacgacaggttcgacctgtgctgtccacagggagtctcttccaaaatgggtgacgtccgaggatcggagacgggataatttatggagaacaaagataacaaatagaaaagagggtataatagtgtatgaagattgaagaactggagaagggactggagaatcaaaaacgcaggagatattttgactagtagccagttaatcccatttcagcttgaatttccgccggtttttccggaacccccttatccaagagctgacgactcccatagaggaacaacccaagcgacatatccacggatcgaatcagcagagtctgcaattttgcgccacggacgtgccccacatggcaataagcttgtcttgagggtcgcgtgggcaatcttggcaaggttttgcgtgtgaaacacgaatttcaacccgatgtttcccatgggtgacgaggacgcgcatcccgctaacgctatgtccattggcgttccccaaaagaggtagcttggctgctagtagcataaagtggcgcccagaaactgattggggcatacgcgtcctcccctatcgcatcattttagtctagtggctgcccggtccgcacacttagagacgggttgagaattggtggatataaggttggacatgtatcgctctcgaataagaaatcaccttcatcggttacttcggctgagattcggttagaggtgcatctcaaagatacaggctctgccaagggcttcgggtaactcgatccgatcgaagccccactcgtccccagcaatgatctctgatgttgctgttatgggctgcagcaacgcaaaaggacccaagatctgaattgcgtaaatagaggataaagagcagatcctccccagactcgactgatcaacggcagtgagcgatcgtggctcatttcgaaacgtcattgaagctgaccaatcatgaaagaatgcccgatggcgcatgaagatagccattgtgcataacactgattgcagaaatctccgaccccgagcctcaactccgagcggtggatctttcagcttgagtccatagcagaaagatattaaaaagcgactttgcccaagctggaaagttgctctttcgattttcttcaagttctagtcttgcttcctgatgtcgactatgagtggaccgggtttattttccagccgagccaccatgcgaccgggaaggatttgaaccggtcctttccacgaaggagatcatatctgctggtacggagtagtggagtgcgagctgaatggctcgaagtaatgggagtgtctagggcataccgcgtacctccaatcgtcacttggattgaccttgaaagtggtggaagatgcgagctggccacaaagcagggcctaaagatgttcggtgtccgtctattccgcaaaccacggacatcgccgttagacaatctcacgcgctaaaatgcttgtcaagacggcataatcggacctgagagatcaacaaacagaataaccgcataaatttcctcaatgaaccagcgttgatatacttaccttcaactcaccctataaattagcgcgtgtcgaacaacacctacctcttttactcggatgttccatagggcacacttgtgcacacttgtccggcataccgagaaaatcaggtttcaacggagatgagccgagtcttcttatcacatgcttatagttgtcctctaccaccgacgccgccaacgccggtagctcatccacttggtttgtggcagtgtcgagtggcctcattgtggggtggacaacaactgagacatgcatgcagatatacagatgcatatggttgaatggctatttcatactccgtactcttcgcgaataggatctatatcccgatgatactataacaccctgttcggcgtacggagtacatagccacacgttatttcacaggttcggccggggtattcgggccggacatacatacatgttatgtcccatgttatgtcccaaggtttgaattcatatttatttccctcatccccacaaatatgaagctatggcgagagtaaaagatgcatgaaccgattagggcaaccaggcactttcgattggccaataatggacttccgattttcggtggaggtgtacagaggagcgagtggaataatgattcgctatgtttagctttagcctttcaatctccattcacggtttcgtttacaagtcgagttaactagtactacggagtatgttgtacactgaactcagccaccgtaaaagaatgtagatcacacatacacggattttaggccgagcgagatggatttccctttccgttttagtgctcaccccttgccgctttttgctcattgagtaaagctgagcacgcccctgagtattacgtaatcgttaaacccgctcactgagcatcacatgattattacataagctacaaagtacattttcattaaagcattgaaactaacttatgaagataggagtgcctcgttgtgaggtaacagggaagggaatgtggacctgcggataccctttgctttttgctttaatcgggagttggggaaacaagcagaaccatctgatatgggttggcacgtgaggaagttcacgatggctattgaaggaagaaagaaaaaaaaaagtattttagtctttctgctggacggaaggaggttggtagtatcatcgtcgtgggcattggccccgacagatttcggtctgtcaactagcaacgttactttgtacatccccgagaatgaagacatcagaagcattaatcaagcatgtgcatcattataaactcatcccggtaaaagtattcatagaacatggagcgtgattggcgttgtcataatattcattatacccttacattgctttatgcgggttactcacatatcagtccatcactcgtcttctctggctagcaaatgaggcggtgaatagaattacccttaggaatcctccaacttggaccagaagggtagtctatcttggtccctatattataggtattcccagttagaaacttttctactaatctcagaatacccaaaaggctagttctaccaggcctatctagcgtcgacttatgcctccacctggaaggcaaatgcacagtggggccacattattggctttactattctgcgcctatgccactattcaacctcgccgagctctacatagttgcggaatatatccaaccctccatttttggttctacaatatctaggaatatctcagcctagccctttcggtaatcaggttagtcagctgtgttctaggatcgtattcgatataattgagcattattttccggtgtaaggtatttacagggtttttaaatccaacctgcacagccaccgctttgagacagataagccacaatacttggaacacctgtaatttccgagttacataaaacaggtacgatcatgtaacgtaattcacatacgagccaccacatacgacccgccaccccattcaacaatctagtttttaaatacatttatcttaaccataacgccattaaattaattaaactaaattcaactatctttctggatacctgttaattttatgcccggttcttccacacccactataccttgctgcagcccgtggacgtggttctaaccctaattaagggcttccgcgcggggggtatagaggtgcttctgatgcttctactaccttagtaatcaattaagaagcttcttgaactgagaggccttcttcagcgggtatctgccttctagatcaggtctatttttacttcttcttctcattttcatcctataagttgtactgtagtaggttttgcggaggatagagcaggtatttgtagaggtagaaggtataggacgaagaacattcgatatagacggtttttcttgtaatgacttttggctatcttaaggagggttgtagactaagctgtagcagcggtacgttatacggtttgacatgccccaggacggaggaggtagcgctttaccaaaaataaaaaacttgatgaaagctccgatcagaagtactactaagagctggccgaggagaagcccttgtgtaaaggacaagctaagagggtgttagcaagatcacatagtccactccacagacagagggcgtacgaggattgaggcgcgagtggcgcgggctcatctgcattatagttagcataccagttcgagcccttggagatagcatcactcactattttggagcgccattgtcagcggctgtcgacaatccttgttcacagtaccatctccaagtggagaagatgttccaactttcggatctctagggctagcttggccgaacggcatatctcttatcgctgatatgccactcttgaccgcctgcctctgaaactttaaggaagtgcccttatctatttcgggactagcgtcgcttgcatctataaaatatgatgaatgcctgccactcgtttcgttttagctcacctcttgccgatttttgatctcagagttaaattgagcccctggattgcccagccctggaggctcaagggttagttaactagttactgatgtgcgctgggatgacgtaatcttacgagttaagctgcggttggggtccccaaggtacggtacatactgaagatgggccccctgaggggcaccgacagccctgcctgcgaaacaggtgtgagagcagagtcgtcactgggagtagtagggtgctagagaggagaacaccatggggtgactactgagaagagaggtggaaaggtgtctgcgttgctatctagtcagttaggcctcgggagtgcttttatgtcacatagccgcttagtcatcctgctctggaaactcccactgcaatacgtacatatatgtacatgtatagcaaccctccaccaatcttcttctttcccttccctctccaaagcactatcatcatcattcactttccttaatcctcgccctgtcgagatcttcattgacataatgcgcaacacctggccgtcccctatggtccgcaaattcattcgcgccaacgcctcggcagacccgccaaggccgtcgttgttgccctcatctgacaagtctgccgagaattcctggcctcaagaccctatccgagacgaatattgtttcttctacgggacattaatggacccaaatatattatccaaagtcttaggatcgtcaaaaccaccacctatgatgcgccctgctaggattattggttacgaaatcaaactttggggcacataccctgctctcctcgatgataaaccacttcatccagtcgatggaatagtgtgtggcctcttatcgccgacgcaacttgatcgacttgccgcctacgaaacggataaatatcatcttcaagcttgcttgattaacgttctgaataatgacggtagcaccgagaaaaccattgagggagtttctttcatgtggaatggtcgagaggatgagcttcgggagggtacttttgatctaaagcaatgggggaaggacagacagctacgtgaattggactaagaactacagaaatgtccaggttggttattcgatgctttaactacgtaagtactaggcttacttacacaagtaggatgtttacttaagaattgggaatttgctttaagacgttttgcttcagaaaatgttgctttgagacctggtgctaagctacatactacgtagtttctttataacaatattctttcggtcaccttcactctctttcaccttaagcatcttttgctctgacactgtcaattctcgcataggtcttggctcaatagctcctgatttcctatggaacagtgaatctaagattccacagttgacaccagatagttcaaagctggttaaaaacttctttaacccttggacatctcgagaaaaacgtgggaacgtggtgtctgacgctgaaattttgaacgaatggataaaggatgccacaaactctacccatggtaaacaggatttctcgtcgttcgaagctagtgcttgacgaaactcaattgtagtttttcctccgtaatacagattggtcaggttccaagcgaagtatcttctgccgccgtcgttcaaaagatctgcaatttcgacatgatttgtgcatcgctcgattagagccaagcaacgacggaaggtttttcctttcaggcgagaattgtcgcagtagttactcgctgcgtaacgattgtagcgtcggtggtctgggacaatggaaaggatggctggttcgaagtagaaaatatgacgggaactggatttcagggttctgagactccatggattcccctgaggtggagaaatgtggacgtgaacagcacatgttgggttcgtagagatcttgcacactaaattgagagctctaaacatgtgtcgcagctgatctctccaggggctttgcgcttggtaaaaaaggattggagtaacaagttccgctggctctgatctgtgttagtgttttgaaagtatgcatgggaattaagacctacattgctcagaattgccgattattgtcacatcatcagtcaaagaccactcagtggagtcttctagcccatcatataagccgtcaatgtcgttgtggattcgaggatgcggtttccttgcggcatggaaatgttgaacgagatagtcggcaaatgactccaggtctgtgaattcagacttcgctttggtacgatgttggagaagtagctcgagttcaattccgatccgcatcccagcctccatgtttggcgtggaaggtgtgagggtaggctttgattcgtgtctgctgtttgtagatagataaaaactccagtgacagatgagtgactttggtgatgcatgtggctcaaaggaagagtgaaagcagaaggaatagggagatatagggcagagtagagccagcattcgtgcaccttcctgatttatcacactcaacagacagcccgctctaccttcctgccaaacatgtgcatgaaaagcctcaagtgcctaatgatctttttatagctttggtacattcttatagcccaggtccagccaaccttgaatcgtccgactcaattcatcgatttcggcttcggtcacggtagtacatccttttggtcttgggtattcttttatctttctctcggatggaatctttatctgtatgagtgctaaaatcatagctgctctcttatagatgtttgtaacccttctctttggcaatcttatcttgttaagtaaagaagttttttctacctatagctaaatagattctaacagaaatccgtctgtattgatgtgtatggtacaactggacgatgttgagaactctaacgccgaaacgtcaaaagaaaggacggaaatcccgtcctccatcaaccccaacaaacaaatccacaacccgattgtaccgcagtcggtccccacattacagcgagcttcaccacccgaggcaagtcgctacgtttgaataatagtatcattgtcgctaattagactagggccaagcgaattatactctatcggggcttataagtgacgactcggtcgcaataatgcgacaagcattatcaccagacccggttgtatttaacgacagccaccaagcatgggcaaatagtgagggaacgacccttctagaaacactcaagactctgtcacaggcagtcaaagatctccagaaaagggccgatacccaggggcaggatatccaagacacaaataagagccttaaggacacacaaaaacaacccgaggatacacaaaagaccctcgaagaggcacaaaataccctcgagaatacacaaatagacctcgaagaggcacaaaaaggcctcatcaaatatgagcggacgtttgacgcacatacaattgagtacaattgaggtgcaatcaacaaaaaggacggtcagtgcttaaaggtttttaattgctgggcgctagcatgcacagaatagatggctgatgaatgatccacctatcacgtgatttgatctgatcttttcatgcctttattttcaggccgtcaagatgagcatgtctgtgcgctgactgagcaaacccgagcactcactgagcactcgctgagcgtaccctgagcactcactgagcaatatttgggaagtactaaacaattttttttacattactaagcataccctaagtgctcacagtgatcacctgtactgtgaaatactcagtgagcaggaacctgagcgcccttataaaagcggcggcaccccgatcgggaaattcgcgaccgtggcctaaaatccggtacatacaggtaaatatggcggagtacggggttttcccgatggggtgccgctgctttattagggtcctcaggtccaattcaccgattattaccggtacaccgcacaacggaggcaaacgaaagatatagaaatcatgtatctttgtaaatttgcatggctaatacatataagatataaccataacatattttctcaactttcgaaccatggagtaataatacgtacagtataagtctaggttgaattaacactaggattaatcatggctgcacgattcagctaccaagataggaaataatgatgctcaaaatgcctcacaaatcaataagcccagaaacttgttatctacgagtttgtcaaaaccattcaattagggttgagatattccgccacgatttcaatggtgggccggaatcgtaatcccgataaacgtccatggaggccttcgagagtcaataatatacgagacgtgctcagttttactctggcgaccaaaaagcggcaaggacagccctaaaggagaagggacagccatctatacctgtatggatgtaagattaccggaatataccacctgggatgtattttatcttctatcccaacctgaactgggctgaacctgacgcttagcgtggagaaggggatttttaccctctccacttctccagggcttctagcctttccctgagcgcttgagcatctttttgctttaagcttcgatttattttctagctttcacatgataatttcttgaatctcttattcacatccttgtggggtctgacatcgaaatctatcggatacttttctgtcagttcgactttcatgtcagtccccattgcacgaacttcactcgatacaatgcctcgatatacacagtaaacagcattattcggacgtaccattgacgccggctcataatttatgggaaagaaccaaactctcggcgcgcgcgcctgtgtgaatatgtcagagacctcctccacatcccaaggcgaatcaagcaccctccaaggatcagccgcccagccgttaaatagatcctgcgagtcttgccggagtctcaaggtccgctgcctccccagcccaaccacgtctaaccaatgccagcgatgcgccaagggcaagcgatcctgcgtcttcgtggcgccgcagagacggcggccccggaagcggacggattcgcgcgttgcacagctcgagaaggagatgcggatgatgcgttcgctgttgaaaaatcgcatccccgaggaagaggaaccggattccagtgacgacagcgacggggacgatgttcaggatgaatcggccgatacggacgctaagagcactctcgcattgcgggacaattcgactcactcgtccgaggatgtccgttatatggattgttcccctgaattgctaaataccccgcactccggcgtgcatggtagtggcggcttttcagcgcccccgattttcacggatatgccggctcgccatgaatcgctgcaggagaggcttcctccggcggacgacgtgatcgatcggggaattctctccctcgaagatgcggagcaattggtggcgtatttcattcacgaacttgcatttttctttccattggtcgtcttgccttcgaacaccacggcagctcaactgcgacaaacaaagccagtcctctttctctccgtgattgctgcgacatccatatccgtcgacgcaggattggcaaccgtgttgaaccgtgagatggttcgcctctattctgagaggttcttcatcgagggcgaaaaatcacttgagctagtgcaagcgctgctgctgatgatcatacattatttcccgcccgcctcgcctttgaagctgcagatttatcagtacacgcacatcgcctcgacgatggcgttagaaattgggttagctaataaacgtcgtgtctcgaaaaagtccgatcgcaaaagcagcaagcatgacgagctgctagctgagcaggcgaggacagttctcggctgctaccatctcggttcaagcgttgcgatgaaaacccgtcgcccaaatatgctccagttcaacgactggatgacagagtctctcaaacacctagaaaactcgccgcatcgaacagatcaacatgtagcgacatggttcgagctccaacgaataaccgacgaagcaatgtcctcattcggtctagacgacaccagtaccacatcacccttaaccgagtcgcgggtccaagccgtgctacgctggttcgacaagcggctcgagacgtggaagaagaacattccaccagatatgctgaccggtaagaaaccccagtcctctcgctgtgtcatgatgcatccaaaatcaatgctaacgaatcccatcaaaccagtccccatgatcctcgaataccgctacacagcactagcaatgtacgaactgggcgtaggagaaggctaccgcgacccagacgccataaagcgacgatatttcacgctgccgaccctcgatggagagaacaacagtggcagcgaagcaccggacgccccactcagcgcaatccgcatcgacatcaaggtgaaatggatgaacgccgcacatgagttgctggacgccgtgctggtttgcagcacggacactttgcgtaaactcccgaatctcacatacactcggttcgcgatggccgtgacatccctgctgaaaatacacttctccgtgcgaaccggtgctctcggggaagtcgtcacggcacaggccgtgaatgtggctttctatctcgatgccttagccagaaagctaagcgaggccagtgccgggggcaaataccttatccccagtcggtggtatcatgtcgtgggtgttaagggccaggattggtatgaccggctggagaggcgccaaaatggagggatagtagctggttctcaagtcgtatcggaaagcccgccgatcggcaccacaaaatcgatcccagcatcacaccctacccaaaaccaaaaccaagtgcaagtgcaagacacacatatggatcaggtcccagcaacgatggactccttccccggcgtccccatgcccccaatgccgccggcgatagacggatacgtagcgatgggcggtgcgggcatgtgggccatggacggcgggaataacccgaatttctacgccatgagcgcggcgggctatcagccctcggtgacgcatgcgcaggcgatgttgccacctcagtttgcctacgagccgcagaggatgccggttagtgctgctgggcagcatatggctagggcgggcatggagttggatgggtggcttcctgatgggagtatctttgggatgcagcctttgcctgaattttgagatggagataagagcctgggattaataaatcccggggtggatgcacatgaaagtgagtctacaacatatataatgtcatatatcataggtatgaactgtatatacatatcagcttgttaatattttaaccccgatatcccgtagtcatatcagcaagggtaaagggttatgttatacttaccagcacattgagaacatcatccaagagattcccaaaaagctagagcctagctcccaataactcaaccctggtagatgggagtatcacttcaaaggcagacatacccatcaccacacacagtcaagtcaccaagacgagaagaaaagaaaaagaaaaagagaagaaaccatcaaagagcgagtaccccaacggacattaatcgcatttaaagcgaaacaaataatacattcgcaaagtgctgtcggaggctcgggaggatcggaacttccgtggaaccgtcggggttcattgacgtgttggatatgggtctgatgtgggtttattcggggtcttggctgttcctttctgcactacggggtatgttgtatgtccctatgttgcattggtagtttttgatagcattggcctgtgtcttgtactccttgtatccgaccttccagataggtcttggattaatttgtgaatgtatcgttgttattgtatttcgatgtgactatttgaaggattttaacttcgttactcgaaattgagttgtataacacattcgtggatcgggatctatggaggatccgattccatggataatcagacagtaaccacatgcaaaaatgcacaggcagatcagtaatcatagtttatgtaaataatctcaatcaaaacaggttcgtgaattcattgcgtagatagaacatggatatcaaagccaaccgaaacaaagaccaactacctgatatattcaactcctggcctggcagtacagaataaaagaaaagcgtaaaagtaaagcaacagaatcatagaattgaaaacgcttccaacgcatccataaacccagcaatagccccaatccccaccaatccccttgtagcatttcgagtcaacgccttctttcgatccttggcatcttcacgcggggatcggcgtgggtgcgtcgacggggacctttgatctgagcgagtcggcgaggatcggaagctagactcgggggacgaggaggaaagcgggtatgtggatggatggtggcggggttggagtttgttgttgttgggaatattgttgtatgcctggtttcgagtcttgggggcctcgaagtagacttggcttggcgatgtgcctctgggagaggggttggaattgggaatgctgatggctgggtttgattggttcacgtttgttgggatggatcgggggattgcagcgtagtcttggttttggtagtatttgtatggctgctgggggggacccggctgtgtgtgtgaaggtaatggtggaggtcggggtagagcatggttcgggggtgggaaactgccgcttgggtatgcggggggtctactgtcgggattgttatgactcggatatctggatgagacgctgttggaatggaaacggcggccttgcatagggttggtgctgtgtgagggtcgaagagtgtcgggtctctgctcggcttcgtcacttgagtcgatgagtctcgagtcgctgcgggggctggatcgacgcttgagatattcgtccggctctggttcgctttccacttgagcttggtagctggagtactttcggcgtagctctgctgcatgatgtcgggcctcttgtgaatgggggtctctccagtccactgttgctccttcgaggtagtaacctcggatgctgtgattatcaaagtccggctcttcggtatcatcttcttcggcatccgaagagacgtagactcgaggttgaactcggttgttggatgtattaaagcccttggcggcatggtgtagttttgaagggtcaatcgaaggcacccagagtaaaagcagccggttcaacgtgctctcagatagtcgcaccatatctttcggggatatttccatatcactcagttccacgtcactattccccaaagcgatgatgggcagtcttgttggatccgagtgtctggttgcggcagcaaatggcttcgatgtcgatgtcgtattggacgagtaattgaaactgatcctctggtttgtcgggttcttggcagcatctaaagtctcctgttccacgagatcccacaagcgatcaaggcgtttgacagaccaatatcggacgatgatcatgttctgagattcagctttctcctgagcaatggcatcgttggtagtggctgtaaaggaatcagtagcaattccgtcgtcaatactggatttcaaaacgtccccaagctctagagtctgtagcatcacaatcagactgagcttgagagtttccaactgggctagcaaataggtgacatgctgtttccggaaacaccatttgagtctatcctgcagtgggattctcataagatcattgtctctatcggttgccttcagtttgtccagcatgtgttcgatttcgatgaatatcatctggccttgtccggagatctcccatgccttctctgtcgcctcgggagaccgttccgtatcagtgccctcaatgatctgcccgacatttttgagcaccagagcgaaaagcgagattcccttggcgatactatgaatctccagtctagactgagcgagttgacaagcggcagcattgaggagcagtgagaggcgaaaacccgcaccggcaaccttgataatggaagcctgtgagcctttagagagaaggaactcattagtagaatttctcaactttcaaagggaaagacatacctggtgccatgataaagcagtgtttcagatcatatcaaagacaaagtggacttcctccaactatcataacctccaagctgttccccgccaagaactagagccgcaactgcatatcaagtgactcacgtctgacatatcaatttggaaccccggagggttctctgtctgtacgcccgcgattagtggcgtcatggtctatgatttctcgccttctcgttggtttacgaggaccggcggagttgatcttcaacccgaaatgatctagcgcatgcttttcattgttacatgaagtcccgggcaaaagtaaccggcactgcctcaaacctcgattgccttggatttgtttatcaagactgttttgcccgtatcaaaagggcagattatgccccggggatttcagatgcccctacccttgctctttacccggggtttttcccagggcgaagcatggtggcaatgacctcgtattacgagaagtgggaatcttgaatgaatggtaagctgattactccgtgaagaatttcgttatctccgagttaagggatctctcttgccttgtataacaaaatataataaaacagctacaaacacagccctggggtatatatatgtgtggagaagacatgcagctattccgaggtggatctactaacattgacctattaatgtgaaacgctcctatagaatgaagaatactccatagagaaacatcaatattcaaaacaatcaaacaagaatgtatgtttttcgaagatctactgttttcattcagacttgtttatttagcatcggacccgatgggcgcatttccgctttcggtccctccacagttccttttgcgatttgcctaatctctccccagacatccaaacctccaactctctactataactctttaagctctttaattacagacttgattcaatcctttgttgtggctgctctctgctagctaattgatctctccgccgcattctccgcccctcctttttccgccgcgtggcacaccgtcatctgcggagactattgcccaagcctgtccgatgacaatctagtggcccaccatcggacgtgggaaactcgtgataaaacaaatacgcccaaataagagccccaaagctcaacgcaacaatcgtgaggccggatgggtgagctcccgaaggtatcgcgaaggaacgagggacaactgggatccgatacaccaccttaaggcccccaagagcctccagtccatgaaaccatgaccgcagcctcgggtgtcactgtagacacctccgattatcctatattatccccgccgaacgccctccattcgtcccagcacgagccccaatcgacaaagggcggttcccccacaaatcagaatggaaaagagacagagcgctcagcgccacaaccagtagcacccaaacccgctgcaggatctgttaaacaagatcctattgcatcagatgaagtagatgattttggccttcccatccgagcacgccggcacaaccccgcacccagcgaaggagagaatgccagccaaaatatccagaatgtacctgtgagctcgacgggctacagtgacgctgtggaaaagggaaaggagccagagttatcacagggcaagctagccaattcgaataatacagaagagcgaggccagggcgcagaccataacacttcttctacactcccctcgtattcatcggcctctacagctcttgctcagcctcggacctcagcttcgaaacaaaggtcaccccaggtgtcggaatggtcgcaccagcgcctcgcccaacctgatgcacattaccccgagagcgaggagtcagagccagagcccgatgagtggaaagcgatgcctgcgcttggagagttcgactattatgacgactatgggagactcattgctcgtggcgccaaagaagaatccgacgaggctgtataccaaggattgggaggagcagggaggggctatactcgggtgcagctcgacgatgatgcccaatctgctacaagtctagatgatgatacaagctacctctttcgagaggcaggcggcaactctgctggtctagttggcgaggaactgcgagataccatcagccagctccaggccaccaaagaccttctcaacgagactcaaaagatcgcgtatgtgggcgttgtcaggttgacaatccattatatgaatcatgatctggcgtcaattgccacaaccaaatctacgcgcagaaccatgcagaaagcctcggatgccatgcgaaaatggggccaggcgatcatggggcgagtctatgctcatatggatatcaattccgctgagcagattatgattgagcagctcgcggagcatggggtggaaccagaagatctggtgcgaccactcatgcagaatgcgcgggtcaagaatcctatggcagagagtgagccgaaaacctctacatccagtcgaaaattcgattctccatctaggctctccgcagagacggactcatctgaactagatccacctccgccatacgaggtccacgagactgaggagctccctgaggtcaagacgccttctgagatgccaacctctgaacgcatagatatcgatctccgctggactgtcctctgcgacctgttccttgtgctcatcgcaaattcagcatacgacgctcggtcgcgcactcttttggaaagggtcggcgcagctttgagtgtaacatggctacagatctcacggttcgaaaagcgagtcacagactcccttgaaatgcaagaacaggaagagaaagagaattgggatgagtcagatcacatggaaaagcgtcgcaagatggccttgaagcggaaatatatgattatgggtttagcaacggtcggcggcggactcgtcatcggcctttccgctgggttgttggcacccgttatcggagctggtcttgctgctgggtttactacagtgggtatcactggaactagtgcattcctgggaggagcaggcggtacagctttgatcgcttctggtgctactataggtggaagcaccattggaatgagagcttcgcaacgacgtatgggtgcagttcaaacgttcgaatatcgacctcttcataataacaagaaggtcaacctgattgtgacggtctctggctggatgactggcaaggtcgacgatgttcgtctacctttcagtactgtcgatccgattatgggcgatatctattctgttctatgggagcctgagatgcttcgaagcatgggtgacactatcaatattctggcaacagaggtaagcttctagagatgtgcgctaattgttaatagactaaccaattccctaggcattaacacaaggtctgcaacaagtactaggcagcactgtcctgatggcgctgatggcatccttgcaactaccacttgtcctcactaaactcgcatacttgattgacaatccctggatcgtttcgttggcacgcgccaattcagccggcctcgttatggcggattccttgcgagagcggaatcttggcaaccggcctatcacattgcttggtttctcccttggtgcgcgtgtgatcttctcttgtttgaaagagctggccgaaaagggtgcccacggtctaattcagaatgtatacctatttggctcgcccgttgtggcgaacaaggacgaatacctcaaggctcggagtgtggtatctggccgatttgtgaacggctatgccacgaatgattggatcctgggctaccttttccgggcaacaagtggtggcatcatgaaagttgccggcctcgcagctgtcgaaggtataccgggcattgagaactttgatatcacctcacttgtgaatggccacatggattaccgtacggccatgcctcggattctgagggaagttggttgggaggttcttgaggatgagtttgcagaaatcgaggatccagacccagataaccacgccgaacgacagcgcgaattgattcgcgagattgatgaagctcgccgagaagcagaggcgaagccagagaagaagcgcttcggcctgttcaagcgaggcaagatggccgaaaagaagaaatgggaaacgtatgatgtcgacaaaaataccgctcctcgcgagtcaagcgatcccgaaagtagccccggcactgtcctcttcgatattgaggccattcgagccgagttgctctccgaggcgatcgaagtcaaagaattagagtcgactatgcctctgatgaagctagacctgaacgctccgtcaaaaccgtcacccgcgcagccctcttcccctatcgacaggaggcccaagacacccgaactcccagctgttactcgcacttcttcactacccccgcaagcctcggggcagtattctccttacgggcccaatgaattctctcccgcgccgatgcacgaagatatggaaatgaccttcgacacatccttctatgaatccccacgatttagaaacgacgaccttcactctcgtccggagttgagaactgcctctacaatgccgacggttggagccagtgccatcggagctatggccatggagcccaatgcctgggcggaccatgatcagggacatcgggatggcgagatctcaatgacgttcgaatagtgtcggctctgggatccttctcatcttgctttccctttctctctttatacttttctttcccggtcttaagcagtagaaacaggtcaaaggtctagatattttgtatctggtctaattactgacccttgactgtggcttgcgagttccattcgtccccatacccgaagtctgtgatacaattccatctcaaacctttcacaaccgtacgggcttcgttacattgcgctagcatgtcctcgcctggcgaagaatccgatttcaatgttttctcctgcacccctcatgttcgcaagaacacactggcatgctcttgaagacggtagtcgggaactctgttctggtcatttccgtttcgacaaagaggatcaagatgctttccatctatattatgcatgtcatctgagagtaattgtgtaaccattctgtatataactgaattagtaactgtctcacgtggaattcgagtctcgcgtttcccctcatatggcgctgagtacggcgggcgataacggcatattggacaactatgcagcggacatttgattggctcggaatattgactacttcaccgcctttctcaccgccgctctcttgatgtgccgttcgatttctggggcttttttacaacataggccagaagtcctttgagggtctctttcttatgagtttttctttccttcttgatgttaactacgggtagctggaagaatgattatcagaagctctctacggtcaatagtgaattatcacagactttgggactaagacggaacggataacggtgacaattatacatacctttcaatatataacatgcaattagggaatgtttggagtattacggagtacaataaatagacctaactagtgaactacttcatattctataaatgttgttacacgcaatggttttctgccagataaaaccccgacctacgcgatgattcaaccaatcaaatccccgttgtccgatacgccgctatcgcccaccgtggccaggtgtccgcattgtctcagtttctcgaaaccgagcgttctttgtttcgaaggcccaaaaagaaatccaacaccgaatcaacactgtacctcgaacttaaccgcagacatctttgcgaagagacttgaaatcacgcaacaacgcgccctgttccaagcccgaattccctcccccggcctgcgcaacgcgcttcacatgaacccggactagttctctttgactccaagctttcagacccccgattgatgccgacaattggcgattgaaatcttccgccaccctctatcatggccgcttgggccaaacctgattccagccatgcgtccaatcgtatgacgagggacaatcctccgcgcgagcatcttttgtctactttcaataaacccaagtctgaagacgcgattctcgacgtcgcgacaatcaatggggaggctgttcaacctgtcgagacaaagccggagattaatacagacgcggagcctttaagctccgacgaagaggacgtcggagacctcattgctggacctagcattgagaaaaagccagaggatgatacagataccgaacctctaagctccccacctcttagctccccacctctcagctctggtgaggaggaagaagcggaagacccggaagcgaacgctgctcaaccaagcatcgagaagaagttggatatcgacaccgatgccgatcctctaagctccgatgaagagcaagctagcgacagcgatgcttccccacctcgcaaagaggtaaactatacgactgcgactttggaaaagaagcttgcggaaggaaacaatagggcatacaatagcccacaaactcgcaatggatactctcgcaaaagcaattatgcgcgaaccctcagtgctatgacgggctccgatgacgaggatgatatatttttgttctcctcgcagagccacaagcggcaaagggcaacaaaatatgcctccaagccctcgacctatttcaacaggccatctttcccctcacggtccaccgagaaagaaatgacctcctcgccagtcgaagaatccccaaaagaacccgaggtgacctttataatgccaaaggacatcgaaaattcgagtttccgagaacctcgtggcgggaaagactcaaactctatatcgcacccatacacgaaggaagaatgcgaagcaatgttgcttgacgatgattcacctctctcatccccatcttcttccactttcgagcaaatgtcgcaggtcgatgaagtggcagcgaaagaagacccccaaccgacatcaccccgtctagccctgtgtccaatgtgccataaggaagtagactgggccgagctagaactgttcaaatcacagccaaagcaacgtattcgcgagcaaatgatgttctgtgaatcacacaagcttcgcagtgcgatggacttgtggcgtgagcgagggtaccctaacattgactgggatgggtttgaagagcgcgttcagggctatttccccgagctcgaaaaactacttgtccctggtgctttctcttactaccgaaatattcttggtagctctttcgcaccagggaaagcgagaaactcccgtgtgagagtgagcgataacgagagactcgagacgatgacctgcggttattatggtagtatgggtgcaaccaaaatgtatgtggtatataagcccctgcttaatcggactacgttaacatttatgtctagactagaaacaatcatccgtcgtttttctgtggttatacgtcgcttagcgacaacagatgatcttatcaagacagccggcgtggctggctacacacagtctgttcttgtgcctgagttggctgtgctaatggtcaaggatgacatgaaggtcaacgacgaagatgcccgtcggattctgagggagagtatggacattggcgacagagttaatccagacttcaatgttgtccccataccgaaagatgccgaatgattgtgggtttacttgacttcattatataccacgggttttatactgtttcatctgatttctggctgtggcttgtgatttatctctgttcgcccccattccaagggccatgcattttttttcattttgagcgattgtatataggtagccattatgataccactcatgttttgtcttccatctactggaacaccaatcgtatcaatcctcaataaagtccaattcgcgcataactagttagttagtcgttattacttagtaagaaaagagcaactcttaactagctaactatagatcgaagataaacattgtcccaaagaggcaagttgatggcgggctgatccgtgaggggtagctttgtcagccgataaggtgattgctcggttgatgacacaatgcggagaagctttccacctgggcaagattgcattctcactcttctatccttcatacaagatgagggaaaaagacatgccttattcggagaccacacctctgctggaggtcaatgtcgctcctccgcggcatagatatccccacaatgctgttcgtcaagcgtgtactatctctcttgcagccctactttctgtggcgactcttctgttcctaattcctactgccattctgcctcgagagcacggctccatctggtcctatctccctggtgctcatccaattccacatgaagcgtggccagagagcttcggtctgccttacgaccagctccagcagatcctcctcaatgtgccttccgcagataaggcccgagagtggagccaatactataccgcggggccgcacttggcagggaagaatctgtctcaggcgctctggactttggaaaaatggaaggaatttggggtggaggataccgagctcgtggcgtatgacatttacatcaactatccggtcgatcatcgcctggccctcttgaagaaatccggtgacaagaccgaagtgaccttcgaagcaacattggaggaggatgtcctcgaagaggatcctacttccggcctgccagaccgtgtcccagtgttccatggctattctgctaccggcaatgtgaccgcacagtatgtgtacgtcaactttggcacgtacagggattttgaggacctcgtcaatgcaaacgtcaccttggagggtaagattgccatcgctaaatacggtatgatattccgtggtttgaaggtaaagcgtgcacaagagcttggaatggtcggcgtagtcatctacagtgatccgcaggaagacggtgaaattaccgaggaaaacggctatgaagcctatcctaatggaccggcacggaatcccagtgctatccagagaggtagcactcaattcctcagtaaggattcttttccaaggtgctgatattgcaaagctaacttgaacaaggtatccttcccggtgaccccacaaccccgggatacgcatctaagcctggatgcgaacgacaagatccccacaactcaatcccttcaatcccatctcttcccatctcgtacaaggaaattttgccattcttgaaggcgctcaacggtcacggccccaaagcgtcggacttcaacgagttttggcagggaggcggcctcggctacaagggcgtagagtacaacatcgggccatctcccgaggatgtgctgattaacctcgacaacctccaggagtatgtgacaaccccgctgtggaatgttatcggtaccatcaagggccacatccccgatgaggttgttatcctcggtaatcaccgtgacgcgtggattgctggtggcgcaggagatcctaacagtggatccgccgcgttgaacgaagtcgttcgcagcttcggcgaggctctcaaggcaggatggaagccactgcgcactattgtctttgccagctgggacggcgaagagtatggccttctcggctcgaccgagtgggtggaagaatacctcccatggctctccgaggctaatatcgcatacctgaatgtcgatgtggctgctgcgggcactaatttcgaacctcgtgccagtcccttgctaaacaaggtcatcaacgacgtcaccgctctggtgcagtcacccaaccagaccgtgcggggccagactgtccgcgatgtctggaatggcaagatctcgacgatgggcagcggcagtgacttcactgccttccaagatttcgccggcatcgccagtctcgactttggctttggtcgtggtaaaaatgacccggtctaccactaccactcaaactacgacagcttcgcatggatggagaagtacggagacaaggacttcctctaccaccaagcttgcacaaaactctgggctctggcagcggcacaattggtggagtctccccttcttgcgctcaacgccaccgactattctcttggccttggatcttacctggaccacatcaaacctgcggcggacaatctcccggagaacactcaattcgaattcgcacctctagatagggcgattcttgagttccaggaatctgcaaaggctttcgatgcctttgctaccgacctgaagtcccagcttggtgataacgtgccttggtaccactggtggaagaaggtgagactgtggttccagattcgcgctaccaacgcgaagtacaagggcattgaacgggctttcttatatcagcctggtctagatggccgtgaatggttcaagcacgtcgtctttgcccctggaatttggactggttattcgggagccacctaccctggacttgtagagagtctcgaagctggagacgtggagaacgccgaggtatgtgtttatttgcgaccctttctgccttgggtacaattactaactgatgggtttttagaaatggagctccatcatccaggatcgaattggtgctgcgacccagttgttgctgtaaatgggtaagcagacttcttacctcggtatgatagagagttggatatacagcaccgctggccttgaggatgcacagatatatcaatataaacaagtctcccgaggaatcggggtcatgtaaacagttccgaacacataattatatagttcccagcattaaattatgcgtgcacatttaccccggacttcgtcatctgactaatcaattgcatgaccgagcttcgtctgcgttacttacatctctcctgatctcaccctctctcttttgacctacaatccttttaacaagcagaaaagaagagacaacctgccttaaaatctacaagatggtatgtccttagatatacttataccacacctccaatccatcctagtccgaccctccaaggccgaatccgaaccatcagcaccatgccaccacccatctcgtacatctttcctaaataacccaaaactaacaaacccaggcatcaccaacaagctccgccctagcgctctccctcctaaccagcgttggcgggataatcggctacacacggactggatccatcccctcaatcgccgccggtgtatccgtcggcctcgtctacctcttcgcattcctgcgtctgcgcgccggccaaacctacggcgaggaacttgggctcctggcctcggcagtgctaggcggaagctcgatcccgcgtgtgatcaagacgggtggaaagcctgttccgctcgttttgtcggtgctggctacttatgggctttttgtttttggggttgcgtttagggagaagagggcgtaggaattggaattgaaatggaaatggaatttaaaatgttaaacacagataatggagttgaatcattgtttgttccttagttatatccgtacgtcatgtcagtctttatcagctatttgcgtattggctttggttggatgctgtacgaatcgatgctactttacggagacaaggtacatcataatcgaacatgcattggtagataatgagaagcctaccggagaaacgctaaaactcacagcagccgtagatggcatcatttttgccatctcggcattcacatcaaacaaactcctccaggccagggttaaacctccagtggggggccaggagggaggatcaaagggcaggcacgtactgtacgtaggccgaacgagcggctcaagggaaccgctcagttctttcttttttttgttttcaactttttttgagttttcctttttcatctcgcagcatcgtactcaaacattaacgacgtttcctgggtttgtcgggagagagatggtgggacgggggaggactcgccaaactagggtttggaatcagggccactgatgaaaccaaagatccagccaggagaatactcatatgtaactagaagttttggtgtgtcgacttagctgggttccgtaagtccaccacttgcaaacgcagcaggaaaaaaaaaaacaaagcaggacttaatgggccgggtcgatcaccgtgtcggagtcttgaatggcgcccacgattgcgttgccggggatctcgccgaggacggtctgcgtgcttttgtctgggacgtatgcatatcgaggtagctgcgccttcttttcctcgggactaagcgtatcatcattgtaaatcattcggatcgcaggcttggccttttccttcttgggcttgctgctaccctctgtcttcgaggcggcatcatttgctgcacctgaaatctgattgtcaacagggaaggcgttctcggttggtcgggcgctggatccattagagtaaccagaaggtgcgggggtgggggggacgtgtcccatgtgcatctgttgcatttcgtgcgcgttgactgaaggcacagcaaaagcaggacgctgaggaaggctcgatgcggccggcaggcccatgaatctgttatcggatggtggaggctgttgctggtggtaagggggagccccataggagactggtggctgtgcaggaagtccgacgggaaatggcgaggggtatccggagggggtgtagggcgaggcaccggggatctggtgtccaccaactggggaatagcttgaatagacaggactgccagtctgcgagaaatgaggtgtcatggcggtgggaggaccaccataaggctgagggtaggagtattgcggagtggctgcgatctgaggcgatggtgcctagtaataattgttagctcccaatacacttcacgttgaacagaacagcagaatacgactcacgtatccactgggtgttggtgtagactgaacagcactagagggtgtcacatcaccactgctacctcccgcaagcgcctcagcacgcctagccttgtgttcagccagtcgcttcttgagctctgagacaggttcaagcttgggcctcttggccggttggccgccagaagaggcgccagtaggagggttgcctgtcgcatgctggcgatccagctcagcctgctgaaattgtgaagcgacacgctgctgatgggctttgaggacatccgcgggaataccctccatgccaaagatttcaatatcgacgcccatgcggttcggcagcgcattttggacctgagtcaattgctccttgtggacctggctcaagtgcacggatagacctagcgacacaagccatcagtatatgagatcactttatctgataaatgcaacttacctccggcagtgttcagtctgcgatggcagttgtcacacttgaaatgcttagctttctggtgagagatgagaatcttcaagtcatcgaagtcacgttcacagtagtagcaccatgggcgatcgagaagctcctcgagagagggaccgcgtctttttttgcccattgtggtgttgacgttaacagagacaagattgattcagatgatgttaacagagacaagggtgacttcaaaaaccgtaaaatatgtgtgcgattgcaaaggagggatgaggggaggtatgtgtcgcagatccggaagcttgccatgatggatgaggccctttatcacgtggctgcacgtgatcaagaagtatgaagttgtgagtgagaaaacttttgagcggtgaggacgagttgcagaagtttttgctctccgcctcttaaattcgagggaattttgagtcccgcgatctgctacaatagggttcctcgcgtttattcacttcctatcgctttgcaggtccggaagcttgccatggtgtatgatgctcgatgatgcccttcgtcacgtgcctagcacgtgatcgggaagtatgcagtttggagtagtatgaacgagttgcatgagtttttgctccccgtctcttatattaaggataattttgagtcgtacagtctgctacaatagggttcctcgtgtttcttcacatcctgtcacttcgtatatctggaaacttgccatgatagataacgtccgttgttacttggttagcacgagaccaggaagtatgaagtttggagtgagttgaaggagtttttgctttctacttctcacatttgggaaaatttctgagtcgcccagttttctatatcagtttctttgcgtttcttcactttctgctacatcgcagatccggaagcttgccatgcatgatgcatgtccttctcacgtggctaacacatgatcaggaagtatgaagtttgaagcagtgtaaaggagttgaaatggtttttttgcttctacctcttacaactgggaaacaattttaaatcactcggttttctataacaggtttccttatgtttattcactccctgttaattcaatgatggatgccgcccattatcacatgctgagcacgtgatcgggaagtatagaaaacatcggagtagtgtaaaggagttgaaggagttgaaggagttctctgcctcttatatttgagaaatttcaagttgcgcagtccgccacaactagtttcctcactctcatttagttcctgttcccctgggctactcttgcgaaatatattggagtatgtcagactgggatatggcaccttggtttttcttatggtctagcggtaaaatacgctgtatattatccaatagagtagaattcccattatactacttctgaataatgatactaaaactattatctgctacaatacagatttagcgtggtcagatgctgatttatataccgtttatccatcttgaacataatcccgaatctgatttccaagatacaatctaaatctttggaaactagtgtgtacaagttaagaattacagatggagaccgaaacttttatacaacatgagtttgaaccttagaatacatgtactggtgcccctggcacatactgccaggggcaccagtaccttcataatgtatcagatcatcccatccccagcccaccccccagggaggtccgaggccacaggaaatcaccccaccccggtttataccgcgggctcagcccagtcgcgaagagggccgtgcaccaagcagtgaatgtaaaccggggtaaagatgattccctgcgacccatcccaaaccctggggtggtccaagaagaaatgatcatttggtgttgaggcaatccccagtcctctctctctcactcgggaaaaaaagtgagatgaacatgaagtaagataagagctaaagtgagagagagaaaactgaggattgcctcgacaagagccggcctaccctcaatggcgtgggtcccgcgggttatgacccgggaggggacccatcccgtggtactggacgtacgggaatggggcgtactggggcggcataggttgccccagttgcgccattggcgcaacagacgcagcagcagcaaaagggttcactgggccggggccgtagtgaggcaccacccccataggagggagggtgggaggcatgggctgctgctgcgcctgtacgcttgccattgagggcaggccgatgggccccttgggggcgaggttgccagcaagtggtgccagcgaaggcgaccgcttgcggcggccggggccagtgggcttggggacctcgtcggcggcgccgtcgacggtccggtcctgctcgatctgggccttggatcgctttgggttgcgaatccgtccttcccggttgaaccggtcccaatgatcgagcatcgccttggtcctcttggggttcttcgaattggcgatcttctggcgcctggcctcctcgatcgcctcggcagagagagcctccttcttggccgatgtcgaggtggactcgacagggctcgcggcggccatcggttcgacggccgggaaggaggtctctgctggagggatcgatgaggaggccaggctgctagcgccacgtcgacccctgccccgagatgagatctgagttggggcaggggtgacttcgaaggtagcccgggaggaaccaaggcgaccaagcccacggccgcgtccgcggccacggccacggccagagctcttgcgagagtttgcgtcggagtgagttgcatcggtgacgacagttttgccgccgcggcctcgggcgcgccgctttgccgggtggttatcatcgtcggtttcatcaccacccgcactctcattctgagtctcttccgactcagtggttttggttggtacttcaacctcggcggccttgcgtttccgagtgactttcggcacaaggggctcacgccggggttcgtacatctgagcgtggtattcaagaccatgtttcttcatggtcgcccacccatcagggttgagatcaccattctccttgctcttcgcaatcatctttctggcttgtgcgggagttggaacaaagcctccctgcacaaacggatcctgctgtgtgcggatgggcacaagtggtgtgttgcccgggaagtagttgtgtttgtagccataaagcatggcctctttcttttcctcgaagtcaagcttgtcctcattgacgttagccagaggggctccacccttcttcttgtgaccctgcatttgatgtcgctttgtttggtatgagggttcatctcgcttgtgtcggtgtgccttgagataaaggttgtcaagggctagatattcatcttggagtgttttcaaggtgaatgcggcggtctgtgtgagtgcgtagagttcttcgggtgtgtggttttcgggattgcggagcatgctgacaagctcatctagttcctgagcctgtacttcgaggaactgacctttctcgaccttggacttcttgtatggaagcgggtgaggagctggttcaggagcgtcccgtttcctggtctttgaagggtcatggaaagcattgtcccaagtggattcacacttggcagcttcctggatgtagttgggggagaattcgtcggtatcgtgaactttccagaagcgctcaaggcgctttttcacatctggacgtcgccactgtgcctcgcggaggcgatactcctcaggatatccagtacgcggattggaaagccagtccaacagatcacgtttcgtttcggggatctgactggcattgacttggattgtagttggctggatgccattgttatcgtcagtggtcaattccactgcgatctcttctccttcttcatcctgagcctcgccatcttcgggcttggtggcttggaccatgggctcgtcatgttcaatggcgtcgtcatcttggagatcgccattctcgtcgtaagtgtcatcggcgccgtcttcggcaccatcatacccagaaaatctgatggttttcgggtgaacttcgttgacatgatccttcagaacatcttctttggagatgcctgcgtcatttgggagcatcaaaagcttcccacagtagtcacacttgagccgtcgaggcacgggctctggagactgagagatttgggtggatgtagattggggacgaaagggttcagaaaattgacgacgtagcggggagtcctggctgtcaccaacatccgatgaaggattgtccacatccaaatcggcccttgggatgggggccattttggaaataaacagtggaggaaaaaaagaacaagaggggtataagtgtttcaatatccaggagaagagaagaagaaaaaaaaaacacaggtctcaaatggagaatgaagaatgtcaagaaagaatctgtatagatagtcagcgtgggttcgcctgcggtgccaagacgccagtaaatcgtagcgcaattccgcggttccaaggccgaaggcacgaggcatggaccagcgcgaacacaagaattgcaaaacattgtaaacccagtgaacgcgacatgtaacatgagaaaaagcatgaaacatcagatacggtcgggccaaaatgcatggatcaagatctgaccgggaagtacactgggaaactgtgccatacaaaaaaaaagatggaaaagacgcgacacttaccataagatgtttagaatcgagttgaatccttgtgggcaggacacacgagtcacagcgaatgactgctggctgttagtgagttatgcaaagaaggatgcagggtggacatgaatggctgccagggatggtgtacttactatccgactgaagaaggctgggtagttgacagtccacttattgagacgacgcgaagtgggatgagagaatatggaggggggatgagatttaggagacaggtgaaatagatgatatgtcagagaaaagtacgttgcaaacttgtggtgtttggcgcgcagatcttgcgtcgctgggtagtatgaagaagaaaaaatgatcttcgtcgacgcgacactgcgcaaagaagaagacacgaaaacaaagacagcaaatgaagtgagagtacagaacagaatgagcacgggaaaggaaaataaatgggaaggtgaaatgggttacagatgatgaagttgagaagagattgaggttgagagagagatagttttgtagtttcataggcagtggaaaccccgtcctggcccgaccaatcagaggcgtcgtatctactagccacattgaacgacattgaggaaaggggggtttttgatttggattgatcactattgatcgcggatttgattgattctatgcattgtattgatcttcaatggcctattgtctttattcctgcattgttacctcttgttcctattttcgtttttttcaacagacgtcacatgatgcgtactttacggtcgaacaatagcaagctcctcgatagcatgtcgcctcaatagcctcaatagctagctattgaggtcaatagtgaaaaattagagtaatgcattttgggcgacctagtggtaccgagctctatgtgctgtcttccagccgctttctgtgacggtctcgtggactcctatatccataatccaagtcacgggcaagcgataggaagaccgaaggccgaagatttggatgttattagacaggtagccgagcacggtggatacatccgtgggggactgcccttgacctccggtgcatagtctccatgccttgtgtcacaaggaacggaaaagtgacgccccatcccagttgggatatagaaacaggaatacacattgtcaactcttcctttattatgtctaccttgagtgtcgagagcacatacgacaagttctgcatatatcccgacaactgtctcctatcctatccgtacatcaaatcacaagtagaggcagcagacatgccaaacccacaattataaccgttcagctttagcctcttctagttttaatatcaaatatgttgttataacgttcgagaagaacccttgtggcaaccgcctcgtcatcagcaagaatagccgctcatgtctccttcgcctatacgacatatttcaaccctccagggcttgtcggatagtaactcagcccggatttgttcacatccataatgattatctacatactaagttggttagttggatataataacttgtcgcattcgtcgttgccattctagtgtagaattttcccaatctgttagaatctttattttcaacgtcaaacttgatgataatctctattagacacagttttttttacctaaggacactgaagagagacgaatcaaaaaaaaaaaaaacgaaagtaataaacaaagatataagaaggagaaacgacctggtgccatttccctttccggactgaaactgccgccgctttttttcatggagtagatctacctaggccctggggccccggggcagatcctatcatcctacaattcatcctcggcgccacatcacaataatattggtagaatgcatcctaaaactatctcgccatcaaaccttactattgatatttgcccatttttgagtgagtacccgtgtggccagagaaaaaaaagaagctccctctgggacgaatcaaggacttcgtcattacgagtgatgtatactccgtactaaaggagctaattttgaatatctcgagactggcattttcagtcaatatagcacggtactggagctctcctgtcaaaaatgtaccctgccatatgtatgtcaatttctcatcggggatgtgcaagaactagattcgtttctaaaatgggtacataccgatctccaccactaaagcagcagccaaaaaactctgataggcaatataccacgagtgggtccccggggtcgccccaattttccctggaatgttccttagacccgtgaaatgccgaggtctccctagaatatttctagtacatactagccctctttaggcagatttacgaattgtatagaggtctttatcctatgggaacataaaatgatctaaagcagagaaaaacatgtcaatagggactagtttagcgcttttttgttgaagtataagacatagccaaggtaggatcccaaagcactacatagcaataagtagtaagctcaataagagtatagtagtattatcagcacataggtggtacaaagtgcctagaaacatacaacatactgcagggactgtacacattctatacaaagacctatagcagtgtcgcaccaaaacagtgtctatcctaaataaaagtccaatattggttcgacctgacactattcaatcaaaagcattccttaaaacattgattgttaaggtacgtcgatgactgcaaagcagtaactatcaacaccgtgctaattatccggagagagcattaatctctggcttcaaggccatctgtgattatactagtagtcgcttagtttatctattgggtaacctcgaagaaaagctctaacatagcccggtatacgcccttgagggctagttggatggtcttagagatttttgcggaattctctgatgttgaggcttctaaaacttcagcaaccgcagccaaggttaccagctacgaatcattcgacctcggctctcctgtctacttaatcttgctatgatttttggtcctatgggaagcatgcactcggaaaaaagggttgaatcctgcgtatatgacgattattcttctataacatttttcctgttgccatttggtaaaacataatatcaattcagtaagcctagggaacccaacttagataggctcgtcgggtggccaccttgggagaatcacagaacatatacccaaaggcgaagagtcaatcctcagatcatccaagtcgaatttccatgcctttgcaacccgactatctggttgatatccggcacgagattgccattccaacgtactggcgttggagtggttgtgaagatgaagggaaaaccggcaatagcactccatacgaaacgtcatacgtttcaaacagggcatacgttgggttgcatagcccagcgatatgagaagccgatggaattgctcatcattcatcacggatgttccgttccatctccgttcggcatcgtgtatcctgtcattccagttgtcattctcgattttggctcggtactccacggtgtgattggacgtccattgtcctagttgattgccttgcttttagtggctatagatatactaatggaaaagagatattcattaccacaaggaagccaggggggtacatcctgaatttccaatgttttcaaatagggccagtgcaaggagcctataataggttggccttttccatccaaaggacacaaaaagtcaaatggaagagtggttctcgccaacttcaattcccgaaggtgaacgctgagatttcgcaaattgatggccaggctatcaatccccgaagggatgacatttagtccaggtaaactatgtttccacgggccatcctccgagccgttataatgtaacactcttaggctgtcaggaataaccccgagcaaggaagccaatgctatatagctgttaataaaaatctagatgaaaagacatcaaaaaaagtacaaggcttacacgctcgacgcctttgtatatactgtaagtaatccggacggacccattcgttgagatccagctccagttcagtgatggttggacagtgttggataatagtctgcactgttccggtccagatttgatgatgccggtttctgtcgaaattttggtttaggaaagagagcttatcaatgcactgaacgtgcgctaggtatagctcggacagattgttgataaaacgcgcccgatatggggggatcggtatatggcgtctacccctgtaatcgaaagaaagcgccgcactagcggtaggacagggcaaagtatctggttccattctaggccacctaacgtgttgagatcctcgaagccctaggtgcaacgtgagacggcaatgctggctccatgaatgaagtgtttggaaaagatcaaacatagccgtctggaaagcgaaatcattggcctgccttaattggttgtctgcgctatatttgctgttttcacttgtggtccagtcgaatattttgcaggggatgatgatatcgtactccagctttcggatccagtttcgccgtatggaacgactaccggatgtgagtttttgaaaatgcgttagagaaattccacgttgcccctcctctttatggtaactgtcactatagacagcgagatttgcatatatcaacggctcgagggctgcctgccaatagcgacacacataagcgcatggaatcaaagaagccccgtcaattcgcaaaagtgttgcgatttcaaatagcagttccaggggtagtgatgtcgccattatgctagcgagtccataacactgagtatcgaaccaggatgaccttgcaaaagaaaatagaataattagagaagaacgagaaggctaagctagaatcaaagggaaagaaggagttcttaaaagaaagataactagttagaagtagtgtactttataagtgcaggcttggcgccacgttgcttggatgtatcacattctgctgtcagtgtgatagatcgtcaggcgtattgggctagggggtcgaacggagtagaggacctcaatactgatacacatacggagtacatacttatctcctaataaaaaaatgtcaatagttctttaaaaccatttgattttgcttataacaccgacagctcagtgcaggtggttcttctcgccaacatccaaagccaccaaaaagcgactaacacaattataagccgcaatcgtagcggtgatctcaaccacctcccgttcatcaaagcacccccttagctccgcaaaaacctcatcgggcaccgtaaccgtcttagtcatggcgtcggtatactttagtacagccctctgctcagcactcaagactgacgacgcagcctcactcgagaagtccacctggatatccctaataaattgcaatgcctctgagcccaatccaccttccacaagcagaggtgcatgttgttcccattcgaacagggcgccgttgaccactgcgacgcggcagatggctagttcacgaacgacagttgtgagggtggttcgggtgcggatcgctccaataaatgagttccagccttctgtgaccgggtaggagtgtaggagggccaggtcgagggggaggagcgggttgggggctcgacgggcttgaacgctggctaggattctggcttcatccggcgtgctagttgctggagggtctgcaacgtaagggagacgcatgatgggtggtacgtaagggttgtaggtgatcttaattagaagttggtatgttcaatggctggatttgagtcgaatatggggtctagggtttgctgtcagttgagatgtgactcaatatgcagtgctttggagccaatggctgcttggatgagacgcaagtggtcagtacctgattcaaagctgtaagatactattgttgaacaaatcggaactggctctatacgggaatcagcaactatttatcggcaaccccgcgtgggtccatagcggataagtcaaagccgcgggagtcggggttgcgcttccgggttccgcaggaattggtttgatgatgttgaaattgcaggtacgcatatgtgaagagagtaagatgtgaagatgcgaagctgtgaagattgatatcctgtgctctctagggatttgtcgtgcggggtgccagatttaaattcaaggcccaggtgatccaacatcaaatatatccaaggcttatattttctctgtgaatctaagaaaatattcagattacagaattaatgctttatcttcatcttttaactgatcttcaccaagtccatccgcagtcagtgctgtcggtcttggcacatgatccacaagttcagaagctcccaaggtgtcgtcacttctcctgaacattgttccccccaaacaaacatgcctccaaaggcccctaaacctaccagtgacgagcttctggctcagtttgataacctcggtcttgacaaatccggcaataaaacagctaaacctgtcgtatccgacaatgtcaagggcgggcaggaggacatactggccgagctggaccacctagccacacagcgtccagccagcggaccaggtactccgcgcctgtctgccgataagcctaggtcatctacacgatctccccgcccgagcgcgaccatcgaccgaccgaccgaggacaaggcgccggtccgccggtctgaggagacaggccggctctcacgcacagaaaccaagccagaacagcccaaggctgagtctgagaatgtccccgcacagcaaccatccgatgagggtgccggctggtggggtggatggtcggggggactgttcgcaacggccaccgcggctatgaaacaggccgaggcggctgtcaaggagattcagaacaacgaggaggctcagaagtgggctcagcaggtcaaaggcaatgttggagctcttcgtgatcttggtatgaatccgcctactcaaagtatgctctcttacatgtagggctaactggcacacaggcggcgagcttcgagacagggcactcccgacattcaccaacctcatccacaccctcgcccctcctatttcttcccatgaacgtctacagatccacgtgactcacgatatgtctggctatccggccatcgacccgctagtctatgcggtattctcgcgagtgatggcccaagtcgagggcggggacctgttggtgatccagcggggtcaggagtcatccccgaaacgtgcgctcgatgtgaccggctacatgaccagtgctggctggaatgacgggccctggtggcggacggtcacacctggacaaccgcggaacatctcttccgttctcggcgccgtggaaggttccaagctcgctcgagccaacgccgagtcctacgctgccgagtacttctcatctcgtggcggagtcgaagaggccgcaaagcatgcttcggaagtcctgagtgaatccaacccggtccgcagcagcgacatctttttcgctatccaggctatcagccagactacttccaatgacctcttccaggctggcgcgacgggcgaaaaggttaccgaaggagccgtggaagctaatacgcaagaagaggagatttccttcgcgatgtacctccacgaccccatccatggcattgccttccacgccatctcccagagtatccctcaggcatggattgaatggctcgatgattcggttctagattccgagaagtcagacgcctatggtgcgaatattcagcgtgttgtggtgcccgaagccattgccgaggtcatcgagggtggaggtgtcgacccccgcgaatgggtttcggagtggattgaagaaactctttcgttgaccgctggtattatcgcgcagcgatacgtggcccgacgaatgggtgtcggtgagggaggtgtcggcaagggcaagatgcgagctgagcaggtgtccactgtggatagtggcgcaggagaagctgcgcgtgcgctctaggactgccgtgatcctataccgagctcaagagctaatgctcttattcccgaatctcctgttgtttatgtgatacacctgctgacttgtacctgcactagctatttctatttctatatttcagtagttaccccaggctgtctagtagggagaatgaaagcaaatgaccattatcgaaaccgcttgcaaagagaagatcatgtatgggattcccgtatatgtatacaaggatggtgtctgtctctgtgagaacgacatgatccagttggctcgatggtggttctttttggtctttttagtctttttaggtattgtttttatagaacttcttcctgatgttccattagacggcagaaaaaggcttaaattttgcagactttctatgtataaccttaaaacggaccggccttcctataaatcaccatattatgtatgcattcgaaaaccattgcgggtatcgtaggatcatctaaagcatttagaatctgttcaacaacctattcaagaatcaaggtccagcggcccttcaagaccggggatatgccagaagttggctcggagggcagtcacacttgatcacaattagcatatccagttccatccgctcattgcaaaaagaacatcttacctagtcgacccattgagcacagtatgagcatccgtgccaacctcactctcctgcaacgtcttcttcatatccgacaaatcagcagaccacttgaagtggcgctgtctggctggcgcatgagcatgtccattaacatacgtgccattcgtatggccattcatatggccattcatatgaccattcatgtagccattcgtttcgccattgacatgaacaccgttcacaccattaaccttctttttcaccccctcctcggcatacaaacagcccctgggccaataatacggcaacgtgtgtgtatacagcacaggcctctcctcaacatccagaaccatcgggacgttgatattataaagctccacgcgctcatcccagttctcaaacagatgccgcacgactctgacagccagtctcgcggccgcggcaataacatcatcaggctgcggatccttgctaccaaacgagatggcaatcccgcgcttaccacagaacaccgcttccagcgcaccgcctaccgtccccgaggacaggttgtagatggtagaggcattgcggccgtggttcgggcccgagatgacgaggtcgataggcgcgcgctcactgaacaggttgtacagacctagttgtgcgcagctggctggtgtgccgttgcggatcactacccagtcgttttcggggtctggggattcgaagctcgtgtcccagctgccgtcggcgtggaaggcgtctgggtgtacgtagcttgctgtgagggaggcttcgattaggtgggctttgccgatccaggagcgtgaggctgccgggattgctacggagacttggtggccgtttgctttgagggtgtcgactagaggtcgaagatatggtgagaggttggtgcttggtggaccatcatcattgacgacctattttaggttgttagcatttttgcattttttgaggggtttatttttttaaatatctatgtcgtgtgacgtgaactggataatagatgcaaggaatcggaatgagggagtagtagattgtcatgtgacgatggtttccggggaagtatataaagcagacccttgcaggaaatgtctttctatactctgtactccgcacacttgctagagggaaaagaaaggaaatttgccaatgatgtcacttaccaggatgtgcatgacgggcgagattgaacagcgccaaggaggttatgggtgatattcgaggttcgattcggatcggtaaaggttccccggtggcggtctgggcctttctgttctctggtttttcttttataagagaataagaagcagaagaaagaaatgttcagcaccccggaaatatccggggtgcagaacacttatacctggggaatcagggtaagaaggaatgagccattggccacaccgaattacacaccggggcattggggtgaagccgttcatgcggggacagcaatgggccgaatgcagcatgcggtgagccgattcggctttctctcggacatgctgaccatgtgttttctgtcatttgatagatggtcaagggttggcacggagtacggagtatattattgcggagcgaagcgaagcaattatgtactcgtgtaagtgacggggtcaataggataggggatgtggggtgttaatagtgttcatagtctatagttcattgtaaatgcagcttcagtcattcgccacctatattccctacatatagtctagaaatggatatccagtgtgtacaactatattgtatatccatatgcggagtaagatatatataataattagtcggcatcggtaagaacgagatgatccaattggctggtagttcttctctaatatattgtagtcttttcgatgttctttgttatcttcacttgctttttgggttttcttaaccttcgtcgttcaataataatccataacctatgggcttaaatactaataggatctatacttcttagtcgtttttttatagtcagaaggttagtgaaagtccaagtgggaagatgaggtaatcaacgctgcaggggagtgctgcaacctacacggtagaacaaggtctggatggaaattagaaatttcgatttggactttgtcgactggggactgtcgactggaagaagaactgagttacatttaatatttcgcctaatgcgcttgcttagacggagtactccgtacggagtagaacttccgggttcctggaccattcatgactcaggggcgcaccacatttcctctcataagaccagaccggagatcgacatgccggtatacaacgtagagcctgcaacacaatacattgtgataatgggcctttctatatatctatattctcatgtatttcaatttagttgggattccaagatttaaaaccaactcccatgtctatattcagcatagatcgttgtacggagtactccgtaaacaagagcgaaatcctaaagtggtctgtgccggctgcacgctaaagtcgatcgcagaaaatcttgaggtggggaaccccgtcagcccttcaacaatcctctggcccctcaactctctcctcttcaagtcattaccgatatatccattcgatagttacttggacacgttgacaaatcctcgctgaccggcataactccattctccgcccatcgaacctgcgaagtctcaagcgaagttcgttgagatctttgctcaactaggtcgtcgccgctacctcaccctctcatcctgtatggactgtagaagtaccgggaccgctgcggggatcgaccccaagattctggacaattggcaaactgaaggcaccttttctgtcgcctcatgggaacatctgggttacgaccaatcgcccgagtgggacaccagccaagactcgagccagtgcgatgcagatatcgcagacctaggcaccttccatggtccactggctggtgaattccgtcgtctggagaacaggtccggaactccctcctgaagtgagaccgcgcagcgcgatgttgatatggctgacacttgttttgttacagaaagcacgatgtgtcacccgagaacttgaactaccccgatggcctcgtcgagggcactggcagtggcacccttagccctaagaccatcccatcttccaccgacgagaattaccattcggacgaggcttggccacaatttcaactatacaacccagtcgccatgccgatggatgcacctcttctctacccctacgcgaaaggaccggaccactccaatggcgctgtcattgtcgatgatgttgaagagatgcctcacagtggttattcggatgtcccagcggagggcatcatgtcgttccagcagattccacagtcctttcctatgattcccgaggaatggtctgtgattccacatgacattcccgtcgaaaatatgcctctgccgcaagagcccatgctactctcagtggacacacaggggaacccaaaggatcactccctgcggggataccagacttctgtccgatcgctggaatcgcggtggctcaatagtctggcatcccaagtacccgcccaacagatcacctcggtctctccaactgctggcccgcgaaatgcacgaatggggcaggagttccaattcaaatctgagaactcttcagtgtcgggcgatatgtcagcaatatacgagtgctcctattccgccactagcgatgatgccgatgccccggcatttgcggagcgccagatggaagacgatgatttccagtggaagacctcatcgcatgaatctacttcaccggaggggtcgcaacctgcattcaaacccactgccttcgtggtgagtgaggcccccgcggaatctctagtttccactgttccctcaaggccaaggacttcatcaactgctggccaacgtgccaatcgaccggcaccgcttgccatgcagtcctcggctacagtcaagaagcgcaagaccaaaaaccccgcttcaatggatcacggcataacaaggccattgcaaattgtccaggaggatggccaagggggctctattgcgtctgcggactttgtctcgcctccacgcggcgctcgtcgcaagggcccattgagtatggttggacgggccaatgcaggcctgcgcaggaaaaacaaggatacttgtgtccaatgtcgactgaacaagcgcaaagtaaggatttccacgtacatttgtgtattttcataagctaacctgtttgcagtgtgacggaagcgccccctgcgatgcttgtcgccctacacttcatgagcaaccatgcgctcgtgcatgcttctccagtattgtcgagtttggaacctgcaactacatctgtatgtatcgatcaaaccctcccatgaggtattcagatttactgactttatctagctcaacgagctgtcaaccaccctacggtggatggttccaaccgagttcggatggagattccatctgaatttgacctcagtcaactcgtgtctttgctcgccgagcgccagggacggttcaacatccgtgctagccaggcctggggctctctctatgtcctcgacttgggggagacctacaagttcctgaagaccctgagtgagtacaacggcaactcgaagtccactttcctagagttcatcgaccgacgaattgtcgactcaaaggataaatccaagaattggctgtcctgcgttgccgactgcgacccaatgaatcaagcctatgtaagtgtccacttctacacgacaagaacgtaactaaccatcctcagaccctcctctcccagtggaacaacatgcctagccgcgccaaatacagcttcgtgtccctcgacccaacagccgaagagcgaacaatggacataaacaacccagaagaccaacgcgaaatcctcctcgcagcgcaactctcccgaatcttctgccgcatgctcgaagtcgagggcttccgcaagcttgagcgcgacttctacaacataaagtggaagcggatctcgcacgagacgcacgtccgcttcctgggcgaactcggccacattctgctcacgctgcggtggcgcgtgagctggtggaagcggctcggcgatggtggccataaccccgatcctacttcgcagcactacattgaccgcgtcgagctgctctgccgcatcctctacgtctactatacatgcgtgctggcgaagctgccctcctggtcagcggccgatgtccctaagggtatttggtcgacgtatgcggactcggagaatgccatctgggacgatttcccctcggactccagtgacggcggctttaacggttggatggagcgtggccaggagttgattgaacaggctggtgttccgagccgcatctcgaagttctgagactgggatggtagacattgcctgcgaatatggttcggatggtaatgtcattggcgttacaattatagatacccttttttttgctcgtttatttccttctcctcgaggtttcgttccattggatgcatcatgacttttacatgcacgctctgccttatgatttgatgatttcacacatgttctatcctattccgcttggtttccgccatttgtacttaattactatttctcgacatatatacacttcttctcatctccacttcatccatctcgcgtccatctcatactacactatgcatacatataaaccatccaaataaaaaaagacaatagaaactgggtatcgatttcatgcactcatataacgagctctagatagacgaactgcaaagatcgaatcaaacagacaaaaaaaaaacatatcatccattaattccccgcccttcaagtcgccttcttaggagcagacttcaaagtatccttgcgagccaaggtcccatccttccgagccgcattacgctccttcagcagacgatccttctttccaccagccagcagctcgagatgacctgcctttgtcgccagactgcgttctgtcattgaggagaggccggatgtgagttgctaagcagcggtgttagtggttgttcttctctggtctcgtcttcttcttcttgtctcgaagggcacagactgcaatccgggtcgaagatatggggactgggaagcgagtcggtgcgtaccttggtcagtctcttctgcttgatcaggccggctttcttgggcgcgacggagcggacgcccggtcttgttgtcttggcgggcctagagagagtgtatgttagtttgattgctccttagtggacggatgggactgtcggctgtggctttgtggttttgtgtctggcacttacttcctgcctgggcccgtgggaccggcctttttcagtgatccttgcaccatatttgtgttgggatggaaattggaatagagagaattggtgaatcggcacaatagaaagaggtaggcaaatttttgtaaagtagcactgccagcagcacaaagtgattctgggcttctgtctcttttttcgggggggttgctggagggaaaattacttatcggcttatctggatcacgtgtgttgtgggcctggggcatgtattttccgttccgaagtatatttgcctggtggatataattttggtgattatgaagaggaaagtgacgatggaaacagatggtgaataagaatgaaggtggagcaaaaaaagaagaagttaaaggcgagaacgaccggggtcgaaccggaacagttgaggtagtggaagatcttaggcacttccctcgtggtacacatgagtatgttaccactaggccacccactgttgattccttattattacctttctgtttcttttcttttagattttctacggcttcttctcctatgggcacaacatcaatatgatcaatatgattgtgtgcatataagaatcttttaatctgtttctagggcagtgtaagttacggttaatacatatgtatgataattagtgatagacctaggctagcactgcatcttctgtcgatatattatcttgataagcatgcaaattcaagtttcgaagtccagtctacttttatatgaagttgcatcacatattgtcccaatgataaacacatctcttgttatagcactcggctacccatcaattatatacttgaaccaaacctgttagtctactcaccggtaatggtagccaagaaaggcccaaagtaccaggatactttgttttcaagatacaccaatgtcccaagcccatactactctctaggatgaccgtatgcaattgagtaatgactatgatggtcaatattagtaggatgtcgtatgttcagactttactgtttttaccgtttgcaggatgttagatctcagagaggggccctatagtggtatttgctgtgtcacgttcgattttggcaatgataaaacatgtttcggtctcattgaagagtttcaagaacttggggggattttcccggcaagccgactgggaaaacgtagaagccgataactacatggtagtccaggatgccttcaagttgtattataatggtcatgtcctcaaaagtgaaacccttgggacgggtatagccccccacggaagatccgccgccaacagccgatcaaaaaacaagggaatgcactcccgaggcgaggccgattaggttgatcatgtttaacggctccgcagctcgtagctcaggtaccagacaccggggaggtaaacactgccagggaatagtcttgtgcctttcgatgtggaatgaaaccgatggaacaacatagatattttttgttcggtccatgtagagatctggaagatcttgcatatgatgaacgacggcagggaggtgctttgcggtcttggtgtattgcacttaccgccgtactaaaagctacctatcacctggaggcctgatcagatgccccccgtcaaccaacctaccatccactaactcgacttcagaaaatggaaggttcccaaaggatctcttgatttgtgggttgaaatgtgatagcttgatagatattgtacatgatgccaaaaaaaatcccgattactctcgcagcttaccgccagtaagtgcctcggcaagcttcctaacacgctcctgagagacatcccagcgaacagcctcattggaacgggtcttgttggcaagattgaacacagtcggggggttacccaggttccagatgttctcgccgggctggtggtcattgcgccacgccgggttctcgccctcggggaatacccggtcaatttcagcagtgagctgctcctcggttgtaatgaaagtgcgagcattcacatacaacgcctggaggtgctccttccgctcaatttctttctgtgcctgcttagactccaggcgtgcccgagagagggcaaggcgttcctcgcggttggggtcgggcagaactggctgtttgtggggcatcatcgcctcaatgatcgatggccgagtgagacgctcgtcctcacgctcgggttgctgaagaatgcggtcccgccgattctgactctcaagactgcggctgacaatctttgagtctgcggaccttttgcgcgagtataggtctcgcagaccgtcccgcaggttctgtctccgcagatctgccatcttgtgcttccattcttgcttctcggggttgctgctgtttgggctcactacccgttcagacttggggagttgtgtgaccgcattgagatattgtatccggggtttgtccgctcgacgggctgggaagagctcgcgaggcacgggtagagtacctctgatatgaggtttgcgggggttggtgggctgaacaattttcggcacatcgatgaagtgaggcgattctggcccaactcgaagattggaggaggaagcaaatcctcggacctgcacagtggcagtccggctattgcggaggacagacatacggcacaattgaaccctgtcactccgtggagtagtaaagctggcaggggattgttgtaaagtaaattatcaatcaagatcaatgacacggcctccagattaagccgcgacgtaacctgaggttgattaccgtataatagggaggatacgcggtcgagtaagtcggaagaaacagaagcgattttacctggtccgtgcacggtaatgtcttggcgccaaaaaaaaaactccttcgccgccttttatttttcttcctcttctctttgcactctgccactctctgtgtttggtcttgccttcgactttttttttcgtcaggcacttacttatcctctcatatttcataccacaaccgctatcatgggtacaggaaagaaggaggccgctcgtaaagtgcggcagggaaagcccgatgatggcatggccaatgtcaagaccaaaggtgaaaatttttaccggtatgtacagcctaagcaaaaatcctcattattttgtaacaaatactgacttaacacccagtgatgccaagaaggtcaagaccttgaacatgttcaagtctggcacgccgcgccgcaacgcgcagggtgatatcacagttgccgcgacttatcaatctaaagagttgccaacagcccgcatcgagccaaaccgtaaatggtttgctaactcccgtgtcatctcacaagaggctttgacctcgttccgtgatgctgttgcggagcgtgcggccgacccgtaccaagttcttctcaagaccaacaagctccccatgagcttgattcgggacaatgataaagtcaacggcttgaagcaacatcaggctaagatgaccatcgagacttctcctttcaatgatacattcggccccaaggcccagcgcaagcgcgttaagcttggtgtatcgtctctcgaagacctcgctggcgagacagccaagatgcaggacacctacattgagaagaacgacgagggaactcatgccgatggaagcgcaattgttcgcggcgacgacactgccgcggtcgaagacctgggtctactgactacctctcgtgaatctgtcttttccaagggacagagtaagcgtatttggaacgaactttacaaggtcatcgattcttctgatgtcatcatccatgtcctggattcccgtgatcccgacggtactcgttgcagaagtgttgagaaatatgttcgtgaggaggcaccccacaagcacttgatcttcgttttgaacaagtgcgatctcgtccccaccggcgttgctgtaagtctcactatttcccatttgatatcccttttgagcactcggtttttgttttcttttctgtcctgcgttttcctgttatccccctgttccatcgctaagtcaaggcttcttcctgcgacttcggtcgtgcacgacttcggttgtgcttgtttcaatggaattccgtctgttacagctttggtatattaacactggcccgcaccgaatttcgttatgaacctaggttgacttgctttcgtcttgaaggcctgtcgcaaagggccagctgtgttttgtttttgagtagaggtctgcttctgcctatttggtggcgttgtagcagacttcttagtaacatcccacacattctatctttacacaatgtttcattcattgctagtgactgattgctaactttgcatctttgactaggccgcttgggttcgtcatctttccaaggactacccctgtctcgctttccatgccaatatcaacaactctttcggcaagggctctttgatctcactgcttcgccagttctcatcccttcattccgaccgcaagcaggtgtctgttggcttgatcggctaccctaacacgggcaagtcttccatcatcaacacactccgaaacaagaaggtgtgcacagtcgcccccattccgggtgaaaccaaggtctggcagtatattaccttgatgaagagaatatatctcattgattgccccggtgtggtcccacccaacgtcaacgataccgaggaggacatccttctccgtggagtctgcagagtggagaacgttcacaacccagagcaatacattccggccgtgcttcgccgtgtcctgccccgtcaccttgagcgcacctacggtatcaagtaccaggagaactacctcgattggctcgcgcttcttgctcgccagggcggtcgtctcctcaagggaggtgaggccgatctggatggtgttgctaagatggtgatcaacgatttccttcgtggaaagattccctggtacacgcccccacccaagggtaccgggaagggcgagaaggacgagaaggacgaggagactgtcgagggtatcgagggccgtgagggtcgactcggcgagatgccccgcaagcgcaagttggatgagaacaacgagcctgccgccaaggctacggaggccgattccgagtctgagcctgctcaggatgaagccgttgatgctgaggacagcgataatgattcgatcgccaacttggaggtcagcgatgtggagagtggcgaggaggagtgattgctccattggtgttcttcaaggcactcgagtgtcatccccattccgccctacgaaaaacagacagtatgccgccatgagatcggttatgctagctcttgaaacaacagagcttcaagccgagtcattcttcctcatgtccgcattgagcggacctggctctccacaaggcatccggcatgtgcttttatcgcacacaagtctgaagaatgccttgcgatatgtcgtgcaggcctgcaaagcgcctgtcatctaaaagccacgttatcaaccgtgagcatcccagtacataatttgtacaaccctaggagttctggcgttttcagtcaccagctccaactcagatacccgattcgatgaggaatcaaaatgaatgaaaataattcttatttaaaccctttcccgttgttttaattagtatcttagtacgcgttgctctatgatccggtattacacctgctgccgagcaacccgtggatcgtaaggttcggattagttgggttgtggttccacccttcaaccacgggttgaatccggggagagaattgtggcagaaaatagtgacattcttggtcaaatccatcttaactaggcaactcgtaataaaagtgcactgagttcctcttcatcctttcatttgacccttccaaggtgctggacgagctaaaatgggtcgaagaccttggtagtttcgacgatgggtcggcaccatcctcaaaagatcaagcacattaagcccactacctggatctttgatggatggatcagctccagcacgcaggaggacatccgcaacctcaaagttaaagcgaaggctggcaatccacaccgctgtggctccagtacggccaccaggggcattgatatcgacgtctggttcggaagcaaggatatactcgacgactggaaccatcccaaacgaggcggcgtagtatagaggatgcgttccatcaatggctatagcatcagtcgtgtttgaagcagcggttgttcgtaacaggacctgtatccatgtgccataatttccgcggccaggaagagacctcgtagcaaagaatttatggatcatatcttgtttgcgctccccaaaaccgcaggcggcaccatgttgtggccagaagtttgcggcgcaagtcatgaaagcatgatcttgtcgtactttggctgggttttcggggtatttcaagtatccctgtgcaaagttgtcgagacataggtacgtgagacacctgtgcatggctttcaggtctgcagttgcagcatctagggcgaaatattggactcgagatgagcggatccaatcagatgttagaaaatctttgacagacgcatgcgcgagattcagataaccattttggtcttcagtgatgagtccttgacaaatgtcaagaataatatggggcgggacaagcatcatatcctcatcgagtgtcatgcatgtctcatccgtgaccacaacttcgttgagactcctcaaagtaagaggctgtttggtgaagctgagccaaaagagggcctcacgagcaatcttccagtcgtcaggggcaattcgttctaacatacttgcatatgtctcgcgtaaagtccctgggaggttctgtaaggcctgtcgcattgcccttacagatcgctgcgcgctcaggttgtccaatgagagctggacccagcggaatctatgaataaataattagatcacagaaagcatagtcagatcggtactgtactgacgatccatcggcatttccaagaagagtggattcaatttccgctcggaattctggtgccaaattgctcaatgtactatcagtctgaagtcggtatttgataaaggtgtcaatgtcccctcgtgactttccgcttatgttcaagacagatgcattggggtgtctgatggagcccatagtgcttgtggtagttataagcacgcggatgttcgtggataaactggcaagcctgagaagggaggcttcaagaagctgcatatcatggctttcattgattgcatcaaccagaaggacaatcttggtcgttccggaagcatatttgaggatggcagcttcgagaacagacaattcgatagggaacctatgcgcctgattcttcgggcctttgttatagatagaccgaatatcacccaaaattgaaggagctgtgcccgagagctgtgccacaagtgatcctaggacgttccttgcattctgagaggcaaaatcactgattgtacaataaaaataagcaaggcacatggattgaccttgagaagccatataagtgagttcatttgcaacttgtgcactagcgaaagtcagatataagatgcaactgaattgccaaatggaacttacaagagcgtagtctttccagttccagctttacaactatgtcagtggaatgtcttagaggttgcgatgggtacatacattttcccaggaggaagaaagatcgattttcttcttggttgagaaacatcttcaaataaccgtcaacgaaccatctaccagtcccatttctatgtctttttgatgcccgcagatgagagctttcagggttcacaggagcgatccattgtagaagctctctgttcaaaaattggttccgctcttgagctcgaatgtgcaagtcttcttttagtgtgtttgtcagatcacgaatctcatgctgcatctcccgatccaccgaattatggtccgccatgagaaccagtatcaaccacgatttgactctttccagacgggccagatggtcgatgacttgcgtctgagtaaatggccatttcagagcttgcttgaggcgcttgaactttgtctcggacgtctccaagtccacgagcaaggattgaaggaactcgtttgttgtgtgcaatactctcgccatgacgtcgcggtcaaataggcttgtttccgattcctcccatttggcgatatcagtagaatgtgctgccaggtgctctaagatcccctttagagcgaagagctcttcgctgagttttcgcacttcggactttgcggtctgcaccgctttgccatacctgatcaggctcgacagcacatggctgacctctattacgagaccggtgatagagatcgggtccattgggattcaaatcaggctaaaactggggttctgttcaaggtggttatcaggctgacaatagctgtgtgcgttgtgtaagctgcacccccacctgggtacctgggcactcatagatcagcctcatttcgctgtttcagacttcgtaaagatgcccgaattgggtctcaattcggctgaaacatcgagtctccctgggctaaggtataattaaactctaactctcctcatttcctataaagagtaccaaccaggcatataaggaaggtcaggagagatattgattcaaaagtgtcactatccacaaccgtaccttcaccgcccccaggtctacatcgtcatcaccggcagcttgcacccttattccctcacgtcaatgttaaaatgcccgccgacatgtctatgattccctataacggaggaaaccttgatgttgttttgtaagtgatcctcaaatatgtgctactggttatctaattgtaaaaggcggcacaatgactcggtggttgtctttgaccatgattctcagcagctcgttctccgcaatacgtcagatgaagacattgaccatttggagctagccaactgcccattctgccatcgctcaatgcgcgagaatagcagagaacgacattgtggggatactgagcccgaaggcgaatttattaatccaaactactttcacatgctcaacaatagcctccccagctctgcaacatcctcgactcctccttctccacgccatcgccttgttcagcctgcgctgccccgtcggcctattaataacgcgtccgtccaacctacatcatctccacaaccaccgccacagccctcaccacagggaatttcctctgcagcattcagtccagattacttcaagaggttctttgtggaggaacgagtgttaggcaaaggtggaaaaggagtggtgctgctagtgaagcatgtcctggatagtgtgtctcttggtcattatgcctgcaagcgcgtgcccgtcggcgacgatcatgagtggctagaaaaggttctgggtgaagtgcagctgttgcagcatctctcacaccagaatcttgtctcgtaccgtcatgtctggctggagaatgcaaagataagcaccttcggtccgagtgtgccttgcgcatttattctacagcaatactgcaatgccggggatttgcatgattacatctgtggctctgttcaaacctccaccactgcgcagcaattaaaggaccgccttcgccgtaaatctaaaggcgaaccggaccctcgaagcaaactcggaggggctcgtacacttcaactagacgagatatattccttcttccgtgatatcacctctggactccggtatcttcacgctaatggatacatccatcgtgacctaaaaccaaacaactgcctgctgcacgagaccggtgatggcatcagagttttagtcagtgatttcggtgaggtgcagtctcaaaatgcaatgcgcatgtctactggtgcaactggtactctttcatactgtgcacccgaagttcttcgtcaagaatatcctggcggaccattcggcaattttacgttcaagtccgatattttttccctcggaatgatactttactttctatgtttcgcggctcttccatacgcgaatgccgacctcattaacgaagaaaaagaggacttggatcagcttcgtgcagagatcaccagctgggctggatttgaccacgcacgcgccatccgctccgatctccccgaaaagctgtataagttcctagagcgcttgctctcggttgatcccagtcgacggccctcagctgacgaggtgttaaatggaatccaagtcggcgcaaattcaaatgagaacttccgcttcagaaaagccagctcgggaagctccgacctgcctggggcggctcgggtccgcccattggatagccagcagccatctgtagagcgagcactttctcccaccaaaagtttgcaccgaaacccagcatctttccggggtgactcgatgtctgactctagtcattttcgaagcagtacggcgcctgtgtctgacaccaacgcagatggcccttctgctagcccagatcaagacatgatcatccggcatcgctactctacttcaccaacttcttctccagtccattctcctcatgaatcatcatcgcccctcgatccgcagccccagcctccgctccctcaacatcatctcctcccacctccaccgagtcgtttccccttccttaattacctgacatctttgaacccattgctatcctcgcctgtcttacaactcactctcttccttgtcaagatcatatcccttcttcatccatgttcaccgctggccgtcaacccctggatcctttaccctctccttctctctgcagcatttactttgagagcccgcagtatccaaactcagactcttgccgtctttttacacttactggtcgtcgggctgggtttccgtctaggcgccctatgtatctggcgcagaaactcggatattactttgtgagtactctaattggtatgccttgcatctattatttcctagcacttttaatgtacatctacatgacactcccccaacggtgcctctattatcgagtcgatgatgtattccatggaggcaagcagccctcaatgtattacttggtttttacacaatcagtttagtcttccatgaattgacttactagtctagggtctcagacccatcaatcatttccggcatcgactctccctgtagggcagttccgggctcagtggggaaatgtccctaaacatgcccgttgagcgagaagggatccacagcagataagcttcctcaaaacccggtgacctttaccgtgatgagcattagaagtaccgggcatcgcttgtagaatatgttggtctccgactctccggtgctcggtccattgctcgcagctaacttagttgcgacagaaactcttctactcttattgaatgtatgtgcctgtgggtttgtctgggacacattctcctctgccgacaaatgattggattgtgtcgagatgcttcaatctacccctcaaggcacgttccccacatctccactggtctgttaatttacaatacagtaacttaccagacgttgcaaatagtacagcttcagcacgataatttgaaacggtgaagccagtaataaaacatcacatgacgaatgtttattaattctactcacgtggacgggccaatcgcccgttttagcggctgcgctgacaatagcgtagactgcgatttgccggctggaagcaaattgcccaatcatttggctacagaattccacggggcgactagggactttcgagcaattagatgccggaccccgacgttgatcagcttccctatttggtatagtgttgcggccgaggttgtcaactcaggtacaactctttcatcttcatatcgacgtagatggaagaggaaactgatcgtcatggcgattgtgcaagtatatgcttgtaaccaatccttgtaacgctgacagatgctagcgcttcactctcattttaaccgatatttgatcgagtctgttctcatcccccgtggttgcttgatttgatctcattgggagacgagtacttgaaacttgccatcgggtctctcggggaaaatatgcgagctccagttctaggctggacgctcgtgtacaagcattttagatgcaggcttgatttggtcggcgtgcatagcgcccacatgggttgaagacaagcaatttccatcatggcttgtatccaaatatcaaatataaaaggcgctccgttccactgctgttgaagacttctttcttgaacaacgacaacttcttattcttccagaagaatcgagctagacaatccgccaatatgcatgccagtgctcttgttggcctcttggccctcgccgccgccgcgactgctgctccctacaaatctagtagcgctcactcgagttcttccattgcgaatctgaagtcccacgttaagaatgttgtcgttctcgttatggagaaccgctctttggacaaccttcttggtggccaaaccattgccggtctggataaccccatccacaatggtcctttctgcaacccttacaacgtgaccgatccctcccagggacaccactgctcagaggccaaggactatgactccgtgactgatgatcctagccacgctgtcactggtaacaccatggagttcttcagccagtggactcctgacaacgccgccattgccgatggcaagttggttcccaacaacaagggtttcatccacgagcagattcacaaccatggtgctaccgccaacgagactgtcaaggctgtgctggccaagcaagtcatgaactactacaccgaggcccagactcccgttctgacctcgctggttaagaacttcctgaccttcaaccactggcactctgatatcgctggtgtaagtggacactttgatatcactgtttcgagactattatactgatttcaatatagcctacctgccctaaccgattcgctgttgttgctggtacctccgctggccacggttccaacgatgccactttcggtacctatgccttcacccagcggtccatcttccagcagttgagtgagaccaatcacacctggctcaactactgggacaccgctggtggtaccggtcctgaggcccaatggttcgcctggaccaaggccaccagcaacgaggataagattgtttccatggagcagttctacaccgatgccgccaacggcgctctgcccgagttttcttacctgaacccctcctgctgcggtgttggtaccacctccatgcacgacagcggtctgatttccgatggcgaggctttcatcaagaaggtctacgaatctctccgtgccggcccccagtgggaggagactctcttcgtcctcaccttcgacgagagcggtggtttccacgaccacgttcctccccccctggccactcgcccggacaacctgacctacaccgagaaggctgccaacggcgaagagtacactcttgaattcaaccgtctgggtggtcgtatccccactctcctcatctctccctgggtcaacaagggctacgttgagcaaaagggtaccaactaccatggccagacccagtcctattcggctagttctctgctccgcactcttggttacctctggaacttcgaacctttcaccccccgtgttgaggatgctgcctcttttgagcacctgatccagagctctcctcgcaagaatgctcccaagacgctccctatcccccacgccttctcccgctagatgtgcaaatgaaagggccgcgaaaccggcggactgggtaacatagacttcatctaaactgatagtattcggaattcaatatacagatttactttatattgataagaaaccatagcatccatagctagttgaaaattatagtaggtgacagtaggacaaaagtcgagacatacgcattcactccaaattaagctatatacaggtgtgatgtcgagagagaataaataaaccacacctccatctatcatccccccagacagtcaatactcccgtagctgctctgaacctccccagaggagaagcacgagtatcatacgatttctctcctgttctggcagaattgtaggagtgcagccagagaagccctcttttcatcttggacttcagttagtgagcgataccatggtttcccatctctcgagcagataggggtatgcaccttaattttccttaagggtaaacccagaagaaattggaagcccgttggttagaggaaggaagaaggagaggaagagtgggagagggagtggattaggaagacaaacaaaacaaacaaacagtcgcatgcctgttttcaccaccacctctgttcaagctactataccaatatgagggagatatctataagagaccgttacaattattgttgataaatacatggatatataggtggattagagaagagaagcccccgacccctgcaaaactatcccattcgtgaagctttgaacttgctcacacgtttaggttgatcttcctcaggaggcaaagtatcctgttcctcgtcgtctttaggcgcgccgttgatgcgtctttgcatattgaagaactccgacgcgatctgcttctggtgaagctcctcgtcatagtgatccaattcaggagccactgcggcccctgtttttacctgtcgctcaaagaccttttcggctagagttcggtcatgtgggaattgaggcggagaaggtttctcgattacatcggagatcggtgcggagaagggtctgggctcttttggtctcgcggggaagagaacaggcggcaccgcggatggagttgtattggcttgtttgcgaaggcgggattcggtgacttgtacgggatttacggttgtagccccagtagtaacagacccattagcaggactagctggagcagcggcccgagcacttctgaaccgcgacgcctttttaggaacagtgggggtggctggagagggctccggggcccggttagtccgttcaacaatggaatcagcgagcacctgaggctcggcccgtacagcagaagttctctcggcgatggttgggggtgtgggaaccggtgcgatatcaaggtcatcagcgaatgcaacccgtttcttaggcttcttgttctctttgatggatgtttcaacctcagcaggtgtcgcgatctcgtgctgcacttcctcggggaacgtctcgatatccttgcccatgttcatcaggcctcgggcattgagcttggcctctaattccatcatctgctggtggtattctgccggaaggcgggtgtgagagcggccgtgttcgtcttcgttatcttcctcgtcgtagtcgtaatcgtattcctcatcaaaggagatgtcgcttccggactcatccatttccaactctgccacaatagcccccacctcgttgatcccataatcgagcatttcgcggcgaagtcttgcttcttccgcagattcattcacgtccgtcacaggcggctgcatgcgatcttcggcagtcacgacagactggggttgaaagaatttcaaagatgcgccgtttggctgaatgcttgtatcatcgccgcttgaggaatcgttctcatgaatttcagccttcgagctgaccggattacccaccacgctttcaagtgtagtatcgacaggagtttcagcagtcttttccggcccactcgtttccggaatatccttgacaccagccttcttcagcacatctagcaattccgaagcgtcattcccgggcgtgttgatcttgctcgagacgacgttcccatcctcatcaagctcttccataatctcctgcatcgggaactccacaccatcctgcagcagtggctggtcattcgagaccaaagcgtccagctcatattgggccttcaagagcctcttctccatagtcgcaacgttctgctgcacgtagtcgatgcgtcttccaagaagatcaaccacttgcccgcgagaccgcctcacaccttgcgaaccaagtattgtccgcatttccttctgatccaccagcgtgccgccaaattccagggccgcggcaaggaactcgtctgtaccagcatcatcttctaggttgctgatttcctcgcggagtccatcgtattccgcttcccaggttcgccagtggtaaagcgatttctgaagttggaggatgttttcttcgagcgcgaggcgctgctcctcaagagcatcgaggttagggttcagtactcccattgttgtgaaagctaaaactcagcggcagctttacaccgactatgtcaattggaacggagcaaagagaggggttgccggaggcaaaaagaaaaaaagtcgcaaaaaggtgacgagggtgtggtccgtgcgcatgggttgcttatcagcctcaacccagtcagtggtccgtctctcccacacgtcactttactttcaccatggccaccgatgcggcttctcgccgtgatgaagacggtaagatgatataaggcttcgtcgtgacggcataatgctaaccatatctttgcgcagaggtttgccctgtctgcaaatcgtcgcgatacctcaacccggacatgcgctttctcatcaacccggaatgctaccacaagatgtgcgagtcatgcgtggaccgcattttttcatccggtcccgcaaactgtccggtagccgggtgtcgcaagacgctgcgtaaaaatcggttccgcaagcagacattcgaagatatcggggtggaaagagaagtagatatccggcggcgagtcatgcacatgtacgtgtcttaccaaacaccccgacgtaccgtgtaatatgggagggctaacaattcacctcgatcagcctgaaccgtcgcgaagaagaatttgactcaaaacgcgcatatgacgacttcctcgaacaaagagaggacataatcgcgaacctagtaagccgcatcgacgtggcgaaaaccgaagcccagctccaaaaatacgcagcagataacatgcaatcaatccgcacaaaccaagccatcgaagccgaggaagcttcctcattccaagcccgcatgaccctcgaacaagaagaagcccgattgcgccggcaagcggtacgccaggaatacgagaccgagcggcgcgagattcaagccggtcgcgaggatttcctctcaagactcgcctccggctcatcgacagatgccgcggccatcgcgcgcgaaggacacaaggtgctgctcaagaagtcgtccgcgcgccgcagcgaggaggaacgcattcgacagaagcaggctgcgctgcggtcggagaccaagcgcgggtcgactctttccacagtcgatcatggtggtgcagcggatacgggtcttgtcaaaggtctgcgcaagatcaagacgcccgagccggagaagccgtacgatccctttatgggctatgtgcccgacaagcgcgattattacacgctccagtcgtattatccgtcgcagtatcttgatcctattcgaaatgatgcgcggatgctggctggtggttatgatttgcgtgaatactactcgcgcacactgcttgaggcttttgctgggttgagctgctttgttggggaggagatctctcagcgagatgctgctaatattacgaagtcgacggctacagagggtgctgctattgccgcggagaatgagaacactgcctgaatgctatttcgacttaggctttggggcttgcatgtatttgtattgttttgtgggctattgagcatagcgatggcgtttttttatttttgttcgcttggggtattacggccactgcatatctaaagaggttcaaaacaagtaaacggtctgaaaagagacctgcgctaaattgaacaagggatggaagaagttatttccaaggccgcggtacaaccgcaatgacatttaagtaccaagaactggctacttaaccaacaatcgattacccaaatcaaagaattaaacatacagatggaatcatactccatgaaacagcgccaaagaagcaaaaagtaaccagaaataatatcaacaaacgcaatgcgatgcaataatcagctcagaccacgcagagaaaggtggcctgtcatctcagtagtgctctcaatgccctcccaaggcaaatcctcttcatcatccaggtcgatctggccgtgacgagaagacttatcggtagtaccagtgacatcaggtgcatgggacataccgacgtcaattccaattgactcaagagtcgcttccatttcgtgctcggtcatctcacgaccgtcttgcttttggccctccaaaacatcgtagagagcgtagatttggtcggacttcatatcgatgtccttgaaaattttatctatcttttcttgcagggccttgcgcgggcgcttgccaagggatgcgtcaagcttgttgtaggcgctttgatatgtggctagttgcatcttcaggtgagaaagctcgtcttctaggcccttgagaacagtagcaagagcgagggcaggggcttgcgaggggcgcattgtgggatcttcgttccagacggatggcttgggcatacgctctgacacaggaatgggtttgacgatcttcacagactcgtgactgcaggtgccgtcagtggagtgacaattgcaaactgtgcagttctgtccgttgtgtcgagcaatgctatccaatgctttctgggtggcttgtggtagcttagataggtcagccgctgccaagtcgatgtgctgaagggtgatatcaggaaggatgaaagcggaggtcatgtcagtgacattacgctgcttcttgcgctgggaagttgtaggcaacgaattatctgaatggcgccgggaacgctctgcagtaggtactgtgagactactgtctccatcggcattttccttcgaggcggtggtaatatctccagtagcagaggctgggcgagggatttctgctttggactcgcgaagagatgacttgcgaggggcaggggttttcaaaatgctctgtctagtcgaattgacagtctctgtaggattggattccttaggggcactcgaacgtcgttgcttgcgcatcattctttcttcttctagtgtcttgcgtagacgagagatttcatgttcatcaataacactcaacagagtaacgtctgtttcagatgacgcccttgtctgctcggacacctcgggtccagtcacatcttcaactaccactcgcttcacgcgctgtttgctcgtattgggttgtttccgggagctctttgattcagaagagcgagacacatactttgatggcttagaagttgatgtacgccttgattgaggcacctcaatagagaagagagcctcatcggcacgttccttttcaagtcgagaaaattccctgtccacttgagtagacactttggagcgggagtcatcctggcgtctggtccttgtggtggagcggttgctttttgaggtaatgtctctggtgctccgactagcgtctccactgcgctcagtgtaaagttggctgtcgtcggcatcctcagacacggctgaactagcgtcggattcgacggtgtcctgttcacgagccttgcggcccctaagtcggctgatctgggacttgagatccgcattttcctgtcgcaattcatcattctcggccttcagctctcgagtttcgagataagcggccccaagttgtgagatagccgactctctatcatgattcaagcgcttgatggcagactcttggacctgggcctttcggtcggcaatgtccaactggttttgtaaagcgagattggctgcgtctaacttttggttctcgttttccaagcgcttggatccctttttgtgcgcattatcgtctggttcgtattttgccgatgactggcgtggtctgttcgccttcaaagaagaattttcctggcggtagctgtccaatcttctctctgcctccgacttgaacatctccagttctgcgaccttatcctgaagtagtctcagatggacaaacaaggccttctcatcttcggggacgggcactgcatccagcggcatatgctcgtgggggagagacacgtctgtatgatcatgaagtggggaaacaaatcgggtcgagcgcatcttgctctgtcgggagtaaaccggtgtgccatcttcgtacacaccggagacgagttcagagatgttagggaggtcgggaagaaggaatgattggtgggtcatggtatcaccgatagtgttggtgttggctgcattggcactgcttttgcgaggagtttccgcggcgttggaagccgatttgcgaacttccttcgcgtaggcgtcccgcgaagctcgctcgattgcgtctgcaatctcctgtgaggtgtttgcgtttccaaaacgcgtcgaacgcgccttcgtcgcaataggggctggtcgttcgtctcccaaaaatgaaccctcgtagctgtcgcgcacttttgcatgcatgtcagagaatgtcctccgctggtcacgttgagccttcgacacttgcgggctcatggtttcttgttgcgcttgcgtcgctcgtcgcacctgagcgttctttcgtaggttttcactgactgcgcgacgcgacggacgcgtggccgcaactggcttttgtggtgttgggtattcaacgcgcattgcgggcgaagatgagcgtacactattctcgaagctcatcatggagctgcgcgagtcgtcgcgcggtggtttggcagcaccgcgtcccacctcaacggacatgtccaaatcgctatgcaaaaaatcgtcgtccaactcgtgttcctcctcctcggaggtctgtatttgcgaaaattcggggaaagcacggtctagtgttgatgtgttgatattgtagtcaagctcctcgtcaacacgtcgtgttgaggtacccattatttcgtccaagtttgtgagcgaaaatgaatcgtcatgtaagccagaatttctgtgcattggaggcattctaagagtaaaagggagaagttgaagatcggaggtggtttgttttggagcaaagtcggaatgtttgggtcgggcgcgtctcggcaaccccggggattctgattggttcaaggcccccacggccgaactacagaatcgaattgttcgacttctttatttggcgttctacttggatgtagatgattgatatttactatatttgcttgaatgatactgtatgggcagtgttggggtctcttagtagatacaaactttgggtgttagatacgtatgatactccttacacttcgaaacagaccccttctatatttatgtagtctcttaatgactgtgatagctctctagatatagttctatctatcatacacagatggattgagccttcaccggcaaacagaacaaatctagtttatatcgagcacgaaaaaggtttccccatattcccatcctggaatttcctgatctgtttacctaaattagcaagatggaatggagacggatttcacggaactcaccaattcgaagatacttgcataaactccacctccgaggactgcgattccgattaggaaacagaccagattgcacacagcatgccagacatttttccggtcatgccaattcccgtctttcagaagtaaaagccacatcacaggagggaaatagaaagacatcccggagacgagcagagccgcactgatagccatgagctcggaaaagaaggggatactttcggcaactatccaagcgatcagggtgacggcaaccacgagcgccagccaggtgacccatcccttcaccgtgttgacgtattgaaccaccgaatcgcgataaatccgcgtatggatgaaccgacatacgaccgttgtattgatagagccagaaatgaagatcacggggagggcgattccaaacgcgattttggacatcacaggccccgcggacagcagagctggggattgaacatcctgtccgacaaatgcatagatgatagacccggtgagcacatagattgagatttcgatgacgccgagtgcagttatcgatttgacatagtctttcggcgtatgcatttcgttcatgaatgacggcaaagcaccagcaaaggcgtaggcaaagacgatgttgctgatagcaaccgctgctttagggaacgtgacatcctcggccggccagtaagaccagtctgaactcgctaatccaccgggcatctgagcctgttggattccagtgccgaccatggtgactccgattgccagaatgatagaaacgaagtcaacatagcctaggattgcaacatcggcgaatgttggcggtatcgccaataagagtagaatgacagcggagataccaccaaatactagagcgcaaattgtactctcagtaatatttgcaaaggcgatcatgcccgtaaggcagtgggatccaacagagagtgtcagttgaaagacgaatattacactgaacagccagtagccaaagctccccatcatcagctgcccaatgtctccatagtgggcaaccgaagggaattttatcttgactgctccgatgatgtaactggtataaatggcaacaattcccatgccaacgcatatgactataccggggatcatccctagaacggcaaatgcctgggggagactcagtgcgccgagagcgatcgcttcgacgatgctgaccacagtgagacgcttccacccgagtcgatggaagttagcatgtccctcgatcaccctttggtcctcgaacccagcatcaccgtcatttgataacaacttggtgttttcatcggcttgtggttgtgggctggcacagcccatcacgggcgaaggaccgttatcgccggggtggaaagagccgtaacccctctcgtcggccattgagaatactcaggggatgctgaagatggtatcctgaggtgtaaagtagagaaagaagagccaaatacggctacggggacatataaacacgcttatctggttttcttgctaaaaatgcaccgagcgctctcatgcggggatgtcataatcccggctggatattccgaatgttttgactcataaactcatccgttgaccactcggatggcatataattctcactataacagcatacactatttacctcaagctttgtgcaacgtactttacctgctgtttttctgctcttactcaagtaaaggcgttgattcatgactggaatgttgcttatctccgattgaagtattttccgcgcgctatgcgccataattgcttcaaagacgtctcgtgtcgtctctgctgtcgtgtcgtctctgctgtcatgtcgatcgcctgattagggctctcaaatagaaacaccgaggttcactgcacaacataatgatttcttccaaccttaaaggttgcattcaccgacagcgatagagtcggtgatagagtcggccgctcgactgttatcagacatcggcgctatcagccgacaccggccttatctggccccactaggccctaagcagtaaaacaagtttctccacattactgataagcagatagtaccatgtatgttattctagaagacatgtaagctaaggtaagctctttgatttttatattgctatcttggtactctccgtatattcgaggagcgtcagcaatggccaagttcgatttgatcatcgttaatggcaaggttgtcacggccagcgatatcaggtaaggtatcggatttagggagtactaccagaaatttaacaaggtttctagtatttgctgcattggaataaagaatggaaagatccgagctctggttgatgggttcacggacgaggagatagagggagtcaaggtgatagatgcacagtgagtaacttctacgcaaaagctgtgaggtttctaacactatgaaatcaggggtgcgtatgttatgcccggcggcatcgatgcacatgttcatctatgccaggatttgaagacaggacctcatggcctgggcggagaatgcgccgacaactttgaaaccggctctagaagtgcagtggcgggaggaaccacgactatgattacctttgcaactcaaacgcgggcagaagaagaccgcagtctgctaaatgtagtcaaggcatataattcccgggctgaagccacgggtagctatgccgactacggctttcacattatcattgttcgaaacgatgctgatgtattggagaacgagctgccagtcttgatgaaagactggggtatttctagctgcaaactattcttgacttacgagacccagaaattgacggactcgcagcttttggatgtcatgtttgctgcgaggaagaattttattaccaccgtgagtggcttatacaaatgcgcgaatgggagttttaacgtttgatagatgattcatgctgagaacggggacatgattcagtggcttacaagtaagttcatgagcttactttctcgttcgaaatttaacatcaacctagacaaactcgaaagcaagggaatggtcggtatgttttaccctgagcttgtcatttaccaaattcctctaacagcctcaagccccgtactaccacgccctatcccgtccgcccttggtcgaagcggaagccaccaatcgagctattgccctcgctcacttgatccagaacccaattctattcgtgcatgttggatccgcagtcagtttctagcggcaatgaaattatctatttgggtactgattttgatagcttggcgcggccaatgtgcgtaaggcacaaaccatggggctccccatttacgctgaaacttgcccacagtacttccacctgacctgggacgacttggtaagttctctctatatattgcgtttggaatgatcaggctaatcgctaatatagaaacgcttccattcccccacgtgctttgagaacagcaagatgatctgctcaccaccaccacctccagatatatcagaccaggaagatttattcacgtgagtatcacctacacttccagaaccaaaaagctaacaatgccagtggccttcaaaatggtactttcaccatttattcttcagatcactgtcctttccgttatgatcatccgaacggaaagccatccggcgtccttgagcatgagccgagcatggagggagagaaacactgtcacggagatgagctccagaatctcttggagcggaaagaaggtacttttcgattaatacctaatggtattcctggggtagagactcgattgccgttgttatatactggggctctggcaaccggtcggattactgctcagaagtttgttgagctcacgtcaacgaatcccgctaaattggtatggatcctcacctttatataaggatgctctagactgactcttcaagtatggtctatatcccaccaaggggaccattatgcctggatctgacgcggatttggtaattgtacggtccctccagatatgtcaagcttttcaagcctcgctaatcatgtgcaaatagtggcatcctgacaaagattttgtgcctttccgcttgactaattcgatgctacaccacaacgttgattgtaagtacctggtccctaatcttggttccgtttactaacgcatctggtcccaagatacaccttacgaaggcatggagtttgtcaattggcccaagtacactattttgcgtggcaatattgtgtgggctgatggtgaagtgcaagggaagccaggagatggcaagtatttaaagcgtggtccaagccagctgagccggtctttctccaagacgagtgcagatccacgctatgtcgcttcttggctctacgattagtccgggcctgttcaatttcatgtattgcagactgcaaagttttatgtatatattctatttgacaatccggacgaggagacaatctaaatgggtcatagggggccatgtcttatctaggcatattcaaagagtagattgaaaaaaggatagagaagagatctagaatgacctatatataaaggacgagaaagatgttcaaaggatgatgtgggcaagaaggcctagctgctttatctcttcggtctagaagtacctttgaatcaaccaagttacactctgaataaagtttgctactagtacggctcgggagataattttagaagaatcaattctaagaatcaaaggtttacggcaatgtcaattgtcaaactaatataaagtctcagatagtacacttgaatcccaaattccctgtctgtcaaacctaactaatcaaaaacagacagtctaattaaatcccaaaatgtccctgtcaaatcaaagtaatcaaaagcagacagtctacctaaataacaaaatcttcttgtctgtcatatccaactaatcaaaaatctcaggtagtatatttgaatcccacattcgccttgtccgtcatatccaaccagtcatggtcggcagccatgtggttttcaattgcctccgcacgcctcttgttgctgaaatggcagactagtccataagctgtaatagcgaacattgctacgatatagcagacaatcatggctatggttccaccggtatactccggggcttgatcggcacggaatgtttgaggtccgatgatatttccggtagcccaagcgatatagaaccaggcgtatagggtaatcctaaaatgcgttagatcagggacttatcttttgagagctgtaaggtcttacttctttgtgtggccggcaacattggcctgatagaccgaaaccagggtgatgtaaggggcccagtatgtgcttgaagagggttagcaaaatgtaacgcattcggaagtttattataacgtactataagatgctgcacagaattaaagtcagtaagagtagatagaaaaaggtcttggagggaacttactataggccaacgagctgtccggcgaggttggttcgcggtaacgcataacacaagatagcaccaagaagcggcagaagaatggagactgccacaataggcgtgcgatattttctggtggtagcggcaatataggataggccaattccagacagggtgctcatggctccaggaggcatagcaaggagtgaggtctgaagaggatcaaagccaaggccggagataatgagggtgttgaatgtggtcagcccaccattgggtacctgcaaagcaacaatggcgatccagatcaaccaagtcttgatgtcgaagatagcctcccagacctgttcaaccttgaaagtcttagactcgacaccggtgttatcggctgccttgcgctgaataacgatgtacttttcccggggggttaggaacttggcttcaagtgggttgtttggcctgtaaagttccatcagttccgctcgacattaatttggatagaatggtggcatacagcacgaagtacaccacaactgatgtaacgatggtgagcgctccgacgagaaggaagataatcttccatgtttcgaatgagccagggtaatatccaacgacccaggcgaggaagccgttgatgatcggagcgaccacgttgagaatgatactgcatcactggtcaatttatgcttctacaccataggatggtgtgctggtacctgtttctctttggttgttcttcaggccgataccacatggaaacaaccaatgtgaccgctggaattaggagtgattcgcagccacccaggagaaatctgcagacgaacaagcctccaaaactggtgcatgccgccatacacatttcgagaacgccccagcagagaacattgaaggcgaagaagggaacagcaggaaccctaagtcagtcagatattgagttcgaattaagcttctcgtgaaagtatgatagatatcttacttttgcaagcagaaggccaagggtcccatgaatgccagtccaccgaagaatggcgcagatccaacccatgaataatcatttccggtaaggttgagatctttcttgatgttataaatagcagctgccgagatagcagtcttgtcaaggcccgatagagtggcgcaaacaaatagctattctatgttagtttttgaagagattcaagaccacacagggctggggcttctcacagtcgggataagtctccaatcaattctgcgcatcagtttcttttcctcttcaacagaccaagattcaccatccatttgatcggcatagtcgctgataatttgggcggcgatgtcgacatccttgtttcttccagccttgattgctttaacggctgcgtctgctgcaacctcgccgcctttgggttcatcactgacggtaacttgatcaacagctatcgtagagttgcagtatcgttcaattgggtatttggctttgattcaatcaggtgggatcttagggttactcacagcccgaccttatatatgcaatgcccatctcgcactataatcttttggtcggaggttattcctcgggcttatcgataggcttatcggctccgatcgtcttggcttccaaggttcaacgcgcgatctcggccaaccttgggaccttcaagccatggaacgcccgaagccacctgactagtcggtgggtccccttatcaacccccgacgataacgaagtggagtggccacgtgaatgaggctgatttttagttggccgcgcgggcaaatcgatccaccgacggccaactacacgataatgtggtcaggccatccactctaaacgcggaatgcgtgggcttgggtgcacgctagctgttttaaaatactcgcgagggtatatctataaatgaagccactcatgaaatcgaacatcctcagaggttttcattgaatcatccaaaaccaaatcgttcaaaatggtatccgaaacagtcgaagagaagcggcctctttaccccgattatctccgtgagtaacatgtccaagagtaggagtctaagcaggattaacaagatccatagcattttatgaccccctcgaaaaggtcgagatggtcgggccattcgagcacgacgaccctggtcatcgagccgatccatcattcccgaatctcttgaaaaaggcgaccaatgttgtccaattgagccctcactgtggaacagagcttaagggtgtccagattgtgagaatatacgctatcattatatcgatcggccgagctaatacaatcgcgaacttagtcggagctttcaaccgagggcctagacgaactcgcgctcatggtggcagaccgaggatgtctagtattccgggaccagaccttcacggatctgggattcgaggagcagaagagaattgcctcgtgagtcaatcttaatcaagtcaggaaccctttcttacggtttacagtcactttggccctctccacaagcatggatggatgcctcatcccaaaaatggcccggaggaatttgtcattgtttatgactctaaagagtaagaatctcttttagtttatcatcttttcgcttgatctcacaactcaatagtgacctgcgcattcgcaaatcttgggctagaaaaagcccaatccagttccatgttgatcaggtaagatccacagcgtaaattcaatgattacagggactaaaagatcttttcaaacagtcccccgagactcagcctccgggtgcgacattcttctgcatgctcgagtctcctcccggcgcgggcggagatactatcatttctaacgtgagtctcatctatgaaataaaccaatcccaggaaactaacaaatatttacacagatgacacgcgcatatgaacgcctttcaccctcgttccgcaagcgtctcgagggtctcaaggcagttcacacaaccgcgaaccctatcatgcgcgagattcgcgacaacggccccgattccgtcctccgtcgaccaattactcgaaccatccacccagtcgtaatcatccaccctgtcaccaaaaagaaggcactctttgtcaactcctcctatacccaaagtattgtgggctgggacgaggaagagtcggactacatgctgaagttcttgttcgaccacatcaaccgtggacatgatttctgctgtcgtgtgcgctatgaacctggcacggtggttatttgggatcagagagtcacgcagcattcgcagactctggattatcaggcgggttctcgccgccatgctttccggttgactcctttggctaatgtgccgattccgagtttgattgaggaggatgatggggagtgtgcgaaagatgaaggccggatgatgctgaatctctgctagtttgattaatgtttgtgtacagatcgcgtgccttgttgccttgttagtcagtttacctagctagttagttgtttgtagaaatctactctcctctctctgctttaacaggttatcggccctctatatccttgtctttgtcaattccaccaactttctatcagattcaacaatctgcatactctcaagtggtggctgcatcttgtaggatacaattttgcaggctaggatttcagctcgaaggggtatgctgagacagatattaagttattaactagctagcttcctgtttgttcgtagagaatcaatgcttctcctctctgctcctttaacagttttgattataaattttatacattatgttacattgcccatcaatgtttccaccttgataaatccgagattcgttaggcccttgacacctgccgctccatttgccgaaatacgtgttgcccaacgccatctccgaatccagctttggagctcggcgtattctttttcgaatgaatactttgcaagctcgaacgtggctggaatttcagctcgattggatggtgtgacgatttgtaaaagatgcaccatgaatgaaccagcaatagcaaaattgggtcgactccctacctcattggttagggcaaagacttttgtaagggatatatggtatactcacaactatgccagaacgaattccactgagctcccgtgagcttctcgacaaattcgacaaattccttcacacataataatgctcccttgacaaccgctttagccccttcgtatgtcgcatctggctcttctttgtttcgttggattattgtcggccatcggtccaacggccgtaacaatgcgcgtaggagggcgacgtgggtaacaatgtaggagaggtagagggacccgtttccatcgaggtccccaccggaattcgctgcgttagacgttgatttcaggttacttggcaaattctcacgccaatccttgagcttcacacgcattggtcgtgcaagatccaaggaatattggagatcattagaggtctttccgatcgccttcaccgaatagaatgacctctggatatcccacagaattgttgttaatgttgaaagatgatacatgtgactctttgtgtccggcgagtcagacaaggtatcttgaatgtcttcttgctggagcagggatacatcgtaatcatcatcacctaaatgactgggcattcctcgcgcaagagcgacccatttctccatgatgtagagtccccaccagagtcgacgacgaagccttttctcccagggtggaatggacatccatgactctgggtctcggtgaagcccaatagtctgtgcaactgccagagaagttgacgaaagcgtccatgcaaacgcggtgtcggaaagatacatgttggtaggaagtcgctgttgaaggagaagacaggcttggagagtggcgagggaaggagcgtgaagttcctgcgataagcaaagccaacacagacgatacaattgctcactggatggcgggtttaacagcaatgtgtagagactgtcgtcatacataacgaacggaagggcagtggcgcatattgctgtcaataatgccaaaggcattctaactaactcgcccggcgatgatgggatctggtggctcgacaaaattggaaaataagggtcaacatatcgagaatataatttgatgagatgccacgctgcagtgggatccatcatagcccatagacgaggccacgcattgtccgtaagctgcggatctagctttggctccgccttctccagaagagaatgatctgtgatcccaaagacagtagggtgtgagagctcgaatggctttccctctttttggtgtgcattatccatgattcgatacttcaagccattcactttcggtaacgacacattctggccatcgtaggcttggtggctcaggatatgaatatcggaaacccccgtcgggccaatatagaagctaaacgcccctggaataaattcaagggaatccacctgagaaggcgaatctcggaacgccggtcgttctcgactaggtggagacatttccgggctggatgagatgctgcctcgagaaccgacccccgccgttccatatcgactgactggtgaatcacttctttgcggacttattgattctgcctgccgagtctcttctggtgtaaagccttcaacgtctttcccatcattcggtcgggtctcggtcaagagatgcagccatccgtcgggttgttcgcatgtctcgaatgtttccagttgctcgtataatctcgcccttttccgcggccccggaccctcctcaaatgtgcattcttgatctctgttggtgcatcggtgacacggcggtccatggggcatgtcgcaggccactttacgctttcgacaagcatcgcaaggccggcatttccgagatttgtacaggcgaccattcaggacaggagcagaaactgagtactccattatgaaagcaatcttagagaatatcagagaggaagaagaacctccggaacgttgagagaaacggagccttatcttcagcacagacgcgtgcttatcatggtcaagcggggacggtttccacactgcacggcagacgacttgggccactgagtattaaaccctcattggaaaatattgccaaacaaaaacttagtcatgtaccctcacataagtaagacatagttatatatatgctgtcaaaaggcggtgataagggcggtcagcggatattcactagtgagagttaagtccctgatggccggtttcgtcagctgtatgtcactaggactttggattgcggagaaattaatgttcttgtggcaagcaagggtcaccggatagcaaattggagaattaggtatcttttgtagggaaactacatgcaaaagatacataaacacaaaatagtcatacccttaatttccataaccctcgaactaattatggagaaggtggaaatacatttatagtgtatgaagtgttaattacttagtattagcatgcttgaagtaagagaatagttgaacctgtacgaagtacactatttatgaggtggtttttaaggtattccttctatattatatagaggcagatcgactggatcaggctttaatttgatctctatctttttaaatgtcatttttttgtgtgttcatgtaccttttgtatggagtttctatacaaaaaaacctaattctccaattcgccattcggtggggcctgccaacacccggtcatccatggatggccctctgggccctaagccgataccgaggcttttgtgatcgtctagtagtaaaacacggtgtcttatctcctcacagcgtggcctccagatccaatagtgcttttagatacggactcgatagaattgtatccgccactttgtcgtccatcggcaatagtggcaaccggggtttatcgccatacccaaattgtcgatgcaacaatttcttcatcccggcaatctgcgatgatgacatgagcataagaatcggaaaaactcccgggtgcttcacttactccgatcttcaatgctactccgtccgcgagagcaatcaggttttgcaactcagttgcctctttgctggacccgctgtcctgacagagatcccacagtttcacgcatgatttctggtcgcttgtcagtcgcttcttatttctttgttgtattattggggcttctcaccggtgctatattaggtaggccgctgatcgcacccgctgatccaaccgagatggatggtagcaagaagtcgataaagccatcgattgcccgaaagggggtagatgatgatcgagggaagtccttttggaaatcgaggctggagacctgggccatgattcgagtcaacttgccaacattagcgcatctgccgggctacgttagcgggaataatttatggaagatgtaaaatggtaaaaacacacgtcagtttcacaccgcagatattggcagatgacttgatgatctgcacaatcaagtcactgtccatatcaataccacccgaaacagcggggaagttgtatatgatactacaaattgttagcaacatttttgtctgaagaccggggtaatacaaacactggcaacggtgatgcctctgcgatatccacgaagaaattcttgatcgaggtggagtctgccaaaagagctccggcatagtatcctggtgggataaccatcacataatctgcgccagcatcggccgcatctttgcagagttgaatagactcgcgagtactagctccgccagcacccgcaacgatcggaacacccgtcaggttgatctcgtcaagggcaacgcgagcggaccggatgagctgcttcttctcttcgtggctctaaagataaatactctgttagcactgtagattttttttgccttaacggaagtctgttaccagatgaattgcttctcccatagacccagatatgactggaatggttccggcacttgcaatgactttcaaactggttagtgaatgttgtagttttgtggagtttcatgactatacatttcacatggctctggaaagctttggaatctggattccgaattagccaagctctcaagccagtctacctgatcagtctaaccaatttcctcatcatcaccgaagaagcacggcaaaggcgtatagattcctgtaggtaaaggccgcatcttgggtgttattgtttgtggcaaagtattaatcgagaagcagatggtcaagtgtaaagttttgttagcactcttctgcggattctcttttgatttgacttcggaatccagccgataaagatacagccaagataggacttccaaggttgggcgagatcttaggcgcggcagagctgcagggcgcgcaaccttatcgatagcgttatctccatgcccacgaggccacgggtgtatgcggggacccgtgggccgtccatggatcaccgtttcttgaagaatcgcctccaaagccggggctgtagggcgtgcagcttatcgttagcgttatctatgtacatacatagatccatagattcctgtagacacatccatgatgcttgtatgcctgtggggatctcgggaccgtcactcgtgcctccacggcctccacggttctcccgaggccctgcaggcggcgcgcattttatcgatagcgttatctatgcggggaccgtcgcccgtggatatgctctccttgtaatctgagacctcatttctgagcatatcttgccgtgatattgcctatcatgtggcatcgcttgccccaagcttttagtaacataggctgctagtgacacgcagaagggctggccgaagcggcaaaagaggatagtgaataatcacatgtttaatcttttttttttctgcccttatctctccactcacacatctttgactatctacacgcccgtttaagctgcctcgggtgaggcgcttcttggccagaatctttcgcttactacaatagtctattcagttccaaggttgtatctatagattcatccacttttctaatagcgtagagatctgcctaaaattctccaattaatcttagtccttagtatgttgtatcgaaagcatattttgtattgtataactccgatatcttctataactatcatgcaacttccaagtttgctgattgatagtgtgcttgttagttaattagaggcagttaataaccatcggggagctctactatatatgaaatcgaattaagacccctcggtggagatgggtaggtcctataggtctaacgtagaaggttgtagtcaacgaaaatgctggcgtcttactcgaggtaatttaaacagttgtgtagatatagtggaaagtagacttgaaggcttttgtatcaatatattgtattcattcgctggtctttgtttccaggatcagtctatgtaactcttgcaatttccgactatgttcatctttcagcgatggtatctcgggaacgttcaacatgaagccgaacaaaaagcaaaatacttgttcccaaatctattatctactccccctaaagtacaaatcggaacaacgggctatcttcgcccatctctcccagctgttcgggagtataggtccgctcaatttcatcaacatccaaaccatcccgtcgcttgttttccttgcgcatcaaaaaccagtgcacagtagcaggaatcatggctccgagtacagtcgcgccaacggagaatccaaatcctagaggatagacaggtgccttcgagatgttagccaaatcctggaattcgaggtttcttcggccaactgacctcgctagagatgtaaatattagatccaatactaccaccgcccacactgccgaacagcatcagaagaccgatggcagcggcccgcttggatggattggtgatgttggagcttgtccatgcgccaacctgttcaaattatcagccaagatcccaatgccgtagttagaaggatagcactgacgattggagcttgcgccgagtatccagccgcagccaagaagattgcaaagtagctcacaccgggaatggaaggatggtgcacggtaatccacaggatgataataccactagatcgttctgtttagctcgagcttccacctttttgaagatcagcttacatcaggccaagagaatatgcgcccatgatacagaagtaccgccgctgctttagatcgctgatgtacccaacagcaacacaaacacacgtggcaaaaatgtaaggaggcgtggtcataacctgggctctcactgcagtatatcccaggtttttgaccatcgtgggcagagtgtaagacagggagtatgtaggcacggagccaccccaccaaaacaacatcatcatgaagtaagttttccggtcttttgcggctgaaagcacatcactccagcggaattcataagtggaagtcaccgggccgttagcatacttgacgcgaagagaagcatattcaagttcctcgtcagtgagccatttggtacctttgccagctcgatattgatgaggaaaggcgctgttcatggtcagttagcttgtttacttaagaaagatattattcggagatctcacggcaagcaaaccagacaagcaaggccggcaaagatggtgatacacccttcaataaggaatagccacctccaagctctccaaccgtgatgtccatccaggtatccgacaccgtaggcaataacaccgccaaaggcaccggcggttgtattcgcaccgtagaaaatagccatgcgcgtaccgatctccttgggcgtgtaccacatggatagaatgaaataagctcctggataaagtccagcctcggtgattcctagcatgagacgaataacgataaagctgccataggagtgcgcttgtgaggtgagagttgtgatgagtccccatgcacatacaatgaatgggaaccatatcttaggacctactcttcgaagcatgatgtttgataccggttcgaagaggccataggtgaagaagaagtacatcaaggctagattgtactgtgtaccattcatgccgatgtcctcaaggagaccgaacagctaatcgcgagagtaattagacttaaatatgtcatggacattgaaggtaatgcatacctttgcattgcccgcattggacttgtcgagtgagcacatcaggtatagaaaactcagtgttggaagtaggcgtgcatccactgaagtcaagcaagtgagcgtctggactgtttcatcatttcaaaaagtcttacacttcctgatgagcttcttctttgcgggtccgttgaacacattgtccaggtgaagaaagcgctcgtattccagcgccgaatttccatctgtcacagtcacgacctcgcccttccgctctgtatcggtcagggaagatggcggcgaaaagtcggtcgatttctccatggtgagatgtcagagtgttgttttcgccccaatgtttgaaaaaaatatcctgatgaagagcggtcttaaaaggtattttggcatttgctggtttatctctgtctagagcttggtatctctcggattgcgagtagttggctggatttggtagcacaaagatcgcggggttcatcctatcagagctataccatttgaagcacactgtcgctatagcaaagcgaataagatttccaattgataggcctgtcgttggcctctccttggcctctccttggccgcgctgggacgataccgctgataagggcgccgtgcagctttatcgcacctcggaagcttcgccgagcggccaaccgtatcagcgtgataattagatgttggaaggcgaaatagatgcatgtaagttttttttttcaacagcaactgagggcagctatatagacccaactaagctgagctgtcaaaacaagtcgcgtaccgattgtttaaagtcaacaaagtcaacaagcacaatgtctagcaccaccgttctcacaccgggaacgatcactcgagagaagaacgaaaatggcgaccctctgtatcctgactacatgcgtaagtctatatgataacaatattgaataagcccgtggatgagtgctaaactctatttctttcacagcattctatgatcctctcgagaaggtagaagacatcggttctttcgagcactttgatcctggccatcgtgccgatcccaagtttcccaatcttctgaaaaatgccaccaagatttgggagctttcgccgcatgtgggaactgaaatccacggagtccaactctctcaacttgacagtgctggcttggatgagctagctctcctcgctgcgcagaggggtgccttggtattccgcgatcaggatttcgtgaatattggcttcgaggcgcaaaagaagattgtgagccattttggtcctctgcatattcatggctgggcgcctcatcctgctgcgggatcagaggagcatatgattatctatgaccacaaagagtaaatataacctctcagtgtgaaatgaagttcactacagctgacactacagccagtgatctccgagtccgtcaatcctgggctggtcgaagcccagtccaatggcacacagaccagagtcctgagcaacagccccctggaaccactttcattgcgatgctcgagtcaccaaccactgcgggaggagacacgctcgtgagctctagtgtgagagcatacagcagtctctcgcctcgtttccgaaagcgccttgaaggccttgttgccgtccacaccaacaacgatggtgtcactcaagaaatgaagcatggccagcaagctgttatgcggcgcggcgtcctccgagctgaacaccccgttgtgctggttcatccggtgacgaagcagaaggctctttgtaagttttatccagaatttcgctctacgcgatcatgttatccctaataatgagtgccgctagatgtcaacccggtctacacgaagaaaatcgtcggatttgaccaggaagagtccgactgtattctcaaattccttttcgaccatatcgccaagcgacaagacttctcttgtcgaatccgctatgaagctggcacagttcttgtatgggatcagcgagtcaccaatcactcgcagacactcgactaccccgttggagaccgcagacatggattccgattgactcctctcgcgaacaaaccaattccagcaaaggttgaagaggatgatggagaatgttcaaaagatgaggctcgggtgcaattaagtctgtgttgattacagtattcaattctgcataattttggcaatctaaaagagataggctgggctgtacataggatctgcgcacagaactaaagaatctcagtctattccaaagcggggggggactgtatatacatcggcaatgccatcaaggtcggacgtgtctttctcttatcaattacaacgtcataattggagtatttcacctataatgatatcacaacataggcactgctaactatattttccctatatttactaattatcctaagatgagcaataactaaactctcatgagtacggagtaaatcagattctttgtactttctgtttttcgagaaatttttggtagaacttatttttcttctccaatgcccgtgccttttaaaccatctgggcactgaacgagtatagggaatgaaatctcatctgatagggacgaagatatgcaagctctgacacctttcttctgccggatgaaatggaggcggtggagccggggatgatcagcacacgtcaaattctttagtgtaaaaactaggtacctctagtgacataaaagtacatactgaaacatcgtagaccaaagtactgataagtatccagtcaccgctagggtacctactccaaacggcgggccacgtgtttcagcgtcacgcaagagcgaccaatgaacgcgaccagaacacccacgtccacaacgtccacaacgtccacaagcgctaacccaaatcctttggagttaggtcgatatttaaaaatggattgatgtccccccttcctcgcattctatatccttgcaggtttcacgtacttgcctggttatgatatcatctactcatactcagctaatgtgatggcagtgttctctgaataccatgaggaggagggcctgcttggagagaggcaatatcaagcctggaaacagggaggccggcagcgctcccgaaaatttactgcattgatcctcatgttcctgctgggcacttttgctctcgttgtatacttcgtgaatggaacccattgcaaccccccttcacgtgccacaggccagcgcgacctacctctggcctctccccttgacaagttgaagagatctgcctgcaatgctgtcgatggcggttatcaatacaactccgagctttcccacaagtggggccagtattccccctatttttctctttcggacgaatcggccatctcagacgaggtaccccatggttgtcaaattacctttgctcaagtgatctcccgtcatggtgctcgatttccatcggcgaaaaagagcaaggtatatgccgagctcattgaaaacatccaagcgaacgcgactgcctacaagggcaacacggcattcctccgctcgtacaaatacgtcatgggcgctgatgatttggtaccctttggagtgaagcagatggtgaaatcgggagccaggttctacgagcgctacgcgacgctggctaaggaagctgtgcccttcattcgcgcatctgactcggagcgggttgtggcttcaggagtgagctttatcaagggcttccagaaggcaaagtctcatgacaaaaatgccaaccaccggcaattaagcccgaagactaatgtcataatctcagaagagcctgggactaacaacactctgaaccacagcgaaatctgtcctacgttcgaagacactaaactgggggacgaggtcacagaaaaatacatggcaatctttgtgcctcccatccgagcccgactcgaggctgatctccctggcattaaactcgaaaacatcgatgtggtcagtctgatggacgtttgtcctttcgagacagtgtcccagagtgacgatggagccaagctatctccattctgcgacctattcacccaagctgaatggaaccattacgactacctccagtcactaagcaagtactacggttttggcgcaggcaatccgctaggcccaactcaaggcgtcggtttcgtaaatgagctcatcgctagactcactcgcaccccagtggtggaccaaacaagcacaaaccatacgctcgacgcccccggtgctgcaacattccccctcaactacaccatgtacgcagacttcacgcatgacaacggaatgattccgttcttctttgccttgggactgtacaacggtactgctccactttctctcactcacctccagtcccctgaccaaacggacggattttcatccgcctggacggtgcctttcggtgcccgcgcttatatcgagatgatgcaatgtcaggacccggagcccctcgtgcgagtcctcgttaatgaccgtgttgttccgctgcatggctgcccggtggataaccttggccgttgccgccgtggtgatttcgtgaatgggcttacctttgcacaatacgggggtgaatggtcccagtgctatgaataaaggactctgaaaataattggtgcggcgttggttctcctttaacatgtgtttaacgataccctaagagtagcatccttactacatatccttattttggccagtgttaatgccatacacgttaccacgagatctgtgtcttggaaacaataagattgtacccaaatatataattgaggctctaacgcatgcaattcgtcaagaaagtgattcaaacagccctccaaccccaagaagcatcccaaatagtaaccagtacgttttaagcatctctgcatctctccttacctaccccaatgtgtccgaccattcccgctaacttcatgcggagcagaaagaacccaagcttcccacagaggcaactgctcacacaagacatgtacaccgtcatcccctagatccccactagacaaagaacgcagtctctcaattgaagtcctcaacggcaacgccctctccctcaccaaagcagagaggccatcacgcggcagcggggtagtaattggcgactgaggatccgaccaggtgccagccgcaaaaccaagagaagacggcataggaccaacatggtaatcatgaacctcgacaccgtttgagacaggaactgaatcaaagtgtgcggcgtaatcaatatccttcagaaccagccgctccagccgctccatttcctcgcgcaggacagctagcacatcgcgccacaagccaccaggccggaggtaaatgccgaggaggcggaaatcgcgtagctgcgacctatggcgacgtgccagtgcgatgatctcgtctgcgctcaggcgccagccttggatgctgagtttgcggagggttttccagcggatatggtggaagagtagctcgaggtcgagatctagtggtgccttgctgagaaagccgatatgaatggcgattaggttcttggctgcgacgaagaagcggtggaagacacctgagaggtcggccatggttgcggtgatgtcggttgtcgagtggaaggttatatcgaggcttgtgaggcgtccggccatggcggcgaggattgttgacggggcgcggaggagctggagggttgcctccgggctgatctggggccctgtgaagcggatggagctgcattttgagtcgaggagggcaatgctgaggtttgtgactgcgcgcgagcaggcggtttcccagtcgaagcggatatctgttgcagtgccggtgccagttcctagtgagcggtcgcgtatgaagtcgatgaggtattcgtccgcttcatcttgaagccttaggagctttatttcctgtaaggctgagaacgccgcaattgcacggcggaggcgggctaggtccttgttggtttcagtcaggttggtttgttcacgcagccggcggctgtgtaattgggatatttcgggattctctgaccccaaagcctgtagtgtctggacccattctgtattctgctcttagtcaatttgctcgcttgtggttgagagattgaagagctgataccgcttccttgataaaagggccgcaccatgtacgtgatggtcttcacatagtaggccagctgcatatctaccagctcatctaatcgccggaagccgtgatcagagaaacgtagagtaaatcgattgaacttgtaaggggtgccgattcgcatgaagcgcttgcagacgagtcgaaagtgatcaagatcggacacttcgttatattcatggtcactagacccgggagtatgtccatttccatgagatctgctgcttagggctcgaggtccgggttcgagaagaaaggacaagatctcgctcattagctcgtcagcgagatcatagatgtgacatggagtcatgatcggcgcgtgcagccgaagcatcgcctgcttgtttaagtggcagcaacatggaaagatggaggaattgagggaaagtcggcgcttcttaagctatccccaagaccgaagaggcgagtcacggagggaattgggaagaggaggggaaacgacaaataaaaataaaaacaaaacacatagctaatactcgactcgtcgctgttctcctgcagacactagtaggatagttgacttatctcaccgtgcatggcgagagctctcgccctaacgattgatttcgcgaccggggacgatcatcaagggcctggtttagcgccctctgcactgacaagccgggctttctgacccgatccgcttgatttcattggtgacgctgccacacaggaatcacatgattgattgactctgcggccagccagcgaacctgcaggaaaggcttttcaccaagagcgcgtagtgtcggggagggggccaatgtagaccccgccgggaagtcatcacatcatgcagggtgatgggccatgcgtgcgaattatgtgtctaccaagaatgattggaggttaatggccgaaatcacgatgaactaatgtgtgttcatgtgtccaggagattatctactagcgaccgaatcttccgtataattacgtgccgtgtgtatgcacctatcagaccttcgcaagatgggctcggcgccgtctgatatccgtgctgctgattttggactcgaagccctcgccatcagtggccgtggttgcctctccagactggagtacgtccacctcgaacacgtcaaggcttttccatcccttcttcacccgctcttcgttgacggctgcccctcccgagtgtgtctcctttgagacaacaattgccccaaggttctcctcggtaatcgtgggtccaaatggatcagagatttccacaaattcaaacgctaggttgggttggatccttacgaggacagtcttgccattgggacctggcgcaaaagcacgttcaatctgcggtgatttcttttcgggtgagaaatccataatggccgtcaggaaagctgcagtactctgccaacgctcctcccaactctcgagaaattcggcatactttttatttaccagcagtgcatccccggtcaccccgatggtcaagcggcccttctgcccccggtggagcggttccagggccaatgcaactgctgtgaggagaagcttgtgaccaacatgaaggtgatcaaatgtgccaccaacgaccacggaatagtgtggagtggatggatgttggttgtcaggaattaacaaagggtcagagatcgcccagtcaggcttgcttgtgatggcttgcatgcttgccgccgtgatctcccgatcctggctgccaacactgttggtgaaggaattagccaaagtttggccgacagtgttgggtagatagaaaacatagttccaacggcgcctcgaatttgctagtgattggacgtccagaatgggcccaaagcgagagctatcggcctggatggccgaggtgttctcgcttgcatcgacaaataccacccgggtatcaatgccacctggagagtccaattcaattttgtgtgctgcacagacagcaccaaccagcgtatagacgctgctcaagtaatgttggagttgggcaaacactttggcccgaggttggcagctcggggaaagaagatctggaatggccagagcaatatcgagcacagctgtacgattggatccaatcaatgcatttgagagtttagtgtagacctccactaaagacggctggaaggcatctttgacttcggcaaaagaaaaagctggaggcgggggaagtagtagtaaagccgagggtgaattggtatggtcggaagccatggtgtgaagaatatatgactacagcaacgagcactggggttaacattcaaatccaagaaatggaaaatcaacaagaagcgagaaatcaaagaaatcacagaaccaaaaagaaccacagccctcaataagtgatccccatcacaggctccaggagggctggggtaccggctgagtcagctgttctcgtgggatggatgacaccgccctctgtcctcctacaactctccgatcgagatgaggatgccattgagagccaagtgacctgacaagctggaatgatatctggctgacacggtcgtctggttggagctccctcgaagccccgctatatcaccgatttggtgcatcccctaacctccttcactgatctcgatcgagaaacagtggagctcatcctccaactacgatccacaccatcccctgcatagacagcgctcttgctcttcagcatagaccgcatcatgtcaaatcccgcttcctacgacgcccaccggcggtcagctgtgttcagtcgccagccggaggagcttcacattccgtcaaccgggccaatcaatccaaactcgtcccgccaatcctcctcgcacgactatcccgccacgtcggacgcgggtgcccggcttccctcaattaacgtacaacagagctcccaatacggcggcgacgggaatatcagcagcagtgccctccccggagccttgcaaccagggaatcagaaccgcccggctgtagtatcaataaataccgctccatcggtcgtccctaccatgcagcagtcatcgtcgcaaaccaaccaccgagcgagcatgattaattcacacggacattcacgatctagcccggccggattcgaccaatccatgtataagcaacacactgcgcccgatggctcgaagtatccctcttcacctggggcatttccccctcacactcctcaaggctcgaagtactctccccttggtctggccgatatcaggccatccggtgaacacatgttgagcgaggcacttatgaaccccgggatgtcatcaatgtcttacaataacggagacaatcaggtgccaaccaacagcaattatgtggcaccatggcctatatacgcagtggattggtgcaaatggcccatcacgggcaattcaggctttggtggaaagctagccatgggaagctatttagaggacagtcacaactatgtatgtgcattcaccctatacatgaatatgttcgcgctaaacagttaacagattcaaatcctcgatacacactggacgcagccagatcccgacaccccagatgcggctgccggagagataaaactggattatgtgaaaacggccgaggcgacacattcttacccggttacccgcatcctctgggagccaccctcatctcagaagcaatcgactgatttgctggccacgtcaggagaccatcttcgcttatggtcactaccgaattcccagcctctccaaagctcgaactcgatcactcgtaccgcgaaccagcgagaccctgccacctccaagctttccccgctggctttgctgtctaactctaaatcccccgagcacactgctcccatcacctctcttgactggaatacaatttctccaagtctgatcattacgtcgagtattgacacaacctgcaccatttgggatattcccacattgacagcgaagacgcaactgattgctcacgacaaggaggtgtatgacgttcgcttctgcgccaacagcgtcgatgtttttgtaagctgtggtgctgatggcagtgtgcgaatgtttgatctgcggagccttgagcatagcacaatcatttacgagccgacggataagagcgagaagcgtaagtagtcttccaggttataattacgtgctctgaatattgacaatatcttcagcagtgatgagccccgggagctccagcccccctggccaatcgcagaccggcctctaccctccacctttgttgagaatcgcaggtatggacgacatgaccgcaacatggcatataatcacaagctaacacaatcccccagcatctccccatgatgcccatctcctggcgacattctcacaggactccagtgttgtccgtgttctcgatgtccgacaaccaggccaagccctattggaactgaagggccattcagctgccttgaactgcgtagagtggtctccaagccgtcgcggtatcctcgcatcaggtggcgacgatagcatggttctcctctgggacctcatcaatcaacacaatgctgcaccgatcgcctcccctccctccgtcaccccaggagcgccgccttccacaacctcggagcgcggccccgctggcgtctggcagagcgaatacgaagtgtccaacatcagctggtccccacaaggcgggcccaaccacaccggccagccacgggaatggctaggagtgtgcggcggacgaggactaacaggagtcgcgttatgagctatcatcaaaagaggtcttgatttccatatgtcgtctgttttcatccttggcgctttccgacaactatggctcttgcattagatggttcgatctctctgatatttgtttctgtttgccgcgatctattacctcgcgtgcgcacagcatcccctgttttgcttcgttctgtttgtgtgcttctctagtaccggtcggcttctctgtctgacccggtacgttttttgcataggtcgagtgagaacctggtgatcttcatgggctactcttggtctattgattggccatacttctgacttgcttggtacgagtgaatgaatgaatgaactatacattggatatgggccatttgctattggttgagaacggccttgggacacccattctacgtaaatcgttgtaatcatattaccccaagcttatagccctggtgggacaactaagatttatcatagtggtcaattccgctgtgaggatttgactgttcgaataaaaagcgcgtatagcttggggctctgtgaattcttcatttcactgcgtgtatgaacatctactttcatttccagttgaaacagtagcatggcgtgacgtgagtcttagttctgtcacgagtctaagtaacaggaggtggatcgaccaacggtcccatgcagtaaaaataaccaagacagctcgcccagcgagcaggtatcatatgcactacaagtgtacccagacagagaaagcaaccactaaacaatgacagtctaatatgaacaggtttatgctaagcagtctcactctgcgtgggtagccagggttgggcgaccgagcgttggacccttggaaatgagacgatcttcgagtgagcgcgcaaatttgacgctagggatgtccacggcacgccagaacacatcgcctagccagatggagacggggagacagatcagccagccaatgaggaagccgaggcagtattggaagttggtctctttgccagtaatattccagatgttgggcatgatggagtagcctagacaatggaggacggggccgtggacgacgtagaaggcaaatgagatatttcctaggtattgggagaagggattggtgaatagtttctggatgtcaggggagtggttgatagagaagacgatgagaacggctccgatggtctgagcgaagcggtgcggctctggataagtcttgggggtgacgtgccacagccagccgtagaaaggcgtccatttgaaaccaatgttgggacatgagccgaaatagagaccgacgacaaagagcgagatccataggccgcggcgagagaccctgatggcgattttgctaccgggactgaagcgaatagttgttttgtcgtcttctaccgccagccgtgcggatggctcccaggtcccgttgataagatccacttcggccatcagcatgccgaagagaaataaaacgagttcccaacgaccataacgcatgcagaaccaagtcaaaccagagactactgtcatgcgcacaggtgctaccaagcgtgatgtccccatgatgacgacaaataggataagcgaggagcggaattcgagaggaatcgtccaaaggtgcggattgtagtagttgtagtaaagcgcatagtcaaatgggttcatcaaggtcgccaatgtgacccacaagtcatcgctttgtttcgagaaggatttatacacacgtggatgttgctcgttagtgccgaggattgtgtgtccttccttgatgaccttatgggagtaattatacagcccgaggcgaaccgccacaaagacgcaaagaattccagcaattgcggggatatatagacgaaatgctcggcggaaggttcctgatgcgagcacggtgaaagtttgatcgaaggacctgctccgaatggttttcagcggcttgtatgataaaacgtagccagagaggacaaagaagatggccaccatgatgtgaccagagatcagcatatggaaaaacggcaactggtgcatcccaaagttttccccgccaaatccccatcctatcgcgaccttccatgtgtatgtgaaaaggaaatggaagttgaagaccagcagacaggcccagccacgcagcccgtctagagctgcgatggagtggagcttcgcaggctggggtggcgagctgcctgagccgtccacccagtgttgtaggaaacttggcgtgagcgcaagtgtcaacctgtgccatgcgtcttcagaatatgccagccagtcttcttgcgacacctcgggatgcgcaaggatgttcgaggggtgaaactgtgacaagccattcccgcggggtgtgatcgtggagtcaggttccgaggaggcagattcgagatctttcaaagggatgtcggaggccgaagtcgtggcccgattttcgaggtaggatgccatattgttatgttttgcaggtcggtcggtcgcaactgggcattgccggtggggccaaaccctcaatacacacgccaaaaggcaaatgaaagcatttaggccggtatagggtattggggaattcggcaaaggggaattgggcagttcgcgcgtccagccagatgcgataaagccggtgatgcgggctgaggtcggcgaattcaggcaaatacgtcagcggaaggcctgctggttcaccgccactgaaaattgcgaaatatgagggagatggaattcaaggatagtctaagggagttgaagagttgaagagtcaaagtcaaagagtcaaggagatcaaagtaaagacaaggcagagaggcgccgatcgattgccgttttcgttaagccgcgttcagaacgagtttcgatataaaagcacttggtacggagtattcatatgagtgatcatatgagtgaggctatagttcgagatcaaattgcatgtgaattttgatctgcatatatgtctatggatatatcccggagacgtctgacgcgtcagtatcatgcagcagggtagtcaatagtcctacatatcctacttctcttcgttgaattgctgacggttcctatgtgacttcctaaattaatagtaaatagattatcaaatttttagtattcgagtccgcagaaaagtaactagaccgtttactcgtcaacatcaacatcatctgaatagccaacagggaactaatatcgacaattcaatatagaattagcaccccggaactaacgtccgatctaaaattcttagatatggcatgcactgagcctgtaccatcattaccaagctcagaagcagaagcagaatcagtatcagtatcagaatcgtcaaaaggtttgggctcgtctcctccttctccagtctccagcgaacttgggcagcttcttgatatcatacaccataacgagccaaatctcccgtagatcctcacgaacagaaatcatggtcttctattagcgatctgtcctccaaaggggccttgtaccatttgttaaggttgacatccatggatagtgtatagttcccaaaacagcttagcgtctgcttaactgcctcaggtgtctacgccaagacatcttgagatcacaaccgtggcctttttaccgtcagaggagactcaagaggttgaaagatatatatcacgtcaaagactgttagacacttgtatgaattatgtgattatcaaaggagaatggacattttccatgattcgctcgaccaagttctccgaatgcatcatatacttcccaggagctccgttttccacgggagcttcgctgaacattttcgagctcccaagcttccaacgtagaacttagacatctctgtgatcgatacaaattggcgcacagcatagaccattggaccttgatgtcgcaggttccctaaagcggcgacgatcctctcagctccctgattcgcgcgattccgcaattcaagaacttctcccttcctctttgtccatccacgcttattgtcccgccgccttctttctgcttcccgacatcttgcaatacaatctgaatgtcgcgatcgtctgtcgcgtgcatttcttgatcaaagtgctcgcgtggtcgaagtggtcccgaagtgggtgcagtcacgatggatttgcgcacgatcatgaacaccgacggcggcgcctccaatcctccacccccaagcaactcggccagttctcccatatccgatcaaaccccccaaaagcgcccgaggaaggctgcttcttactcagaatattctacacgtccgccccagcctcctccgttgcaacacccgcagcacgcttccccagagcgaagctcaccttacgcatccgttcaatcgccataccaacaattcagctcggcccctgtgattaatacagcggtgaggtctcagcggagtcagacacctccacacgtttcgacaccgtatggtcccggcacgcgtgatccatttggcgcgccggcatactggtcgcagccccaacaccccggtggtggtcctctggtttcgccatacacaccacagccgatgagtgcgggaccacaacacccagaacaaccgtcttattttgcccagcagcgttctcaacagcgttctcaatcactccaatcggtgatgacaacaccccgagctccaatcgaatctttccgcagccctcctgttgcatctcaacctcttccatcgcagcacttctctcccgccgcacaccgatctgttaccggcacccccttgggtcctcctgctgcctttgctgcccgtcaatctccgtcaactgcccgcccgccgtcctccggccacaattcccccggcaatcccctatccagcccgaggcccacacgggaggccccgatacgagatcaagttccaacgcaatcacctgtgactcagcgacagttctctccacacagttctcaaccgcccgagccgactcgcctcccttcaggcggctcaaagcaagagccaaccgagagcgccagtccccaatccatatcccgtcacaatagcatcgtcacggcctcggagtcagcgaccgctggtcaagttcgttcttccgaagaccgaatgctggttgagagtcctactgcacaaaagtccaccgtggcaggatcagatttcctaacctccccattggcaccgggcagtcaaatgaacagttcaccctccgctcacggaggcgcccatgccgtggacatggaaatcgaccacgaaccacgcgtcgatatacaacagcccaaacaaaaaagaaggaggtacaacgagcctccgatctatgctcggctgactccccgcaacacaaacagacgcccgattattcccaatccccgtcccccaattccgaaacatgcgcgaaaaagccagcaggatccctccgtagctgttcgcagacggtcttcctcgacaaaggctgtcacacccgccgcgcgggtcacacgagcacttcctattgcttcaccaaacacaagtgtgcctcgcgtccaagcttccccagctccgcccgctccctcacttcgtccgccgaattcgcaggtggtaggctcgctgggcccttgggagccgtccattactggcttcattccacacgaggagattacaaaaaccctttgtgatttcttgtttcaacatgtggtcatgagaaatgatgtcaataccggcccagtaggctctgttgcggctgccagtcaaggaactatcatcgaaattgaggcgaaattgggccatattatcgacttagacagcagagagcggattcacctgccaattttaaccgagagtgtcctcaatcgagagaatgcacgaattcggacatcctttgagagcaacatgactgtggtaagttgataattcgatgtcctatagcgaggatgcctcgacctcgatgaagtttacttaccatgatccacaggaacaacacagagctatgaataattttctgaatgaggctgtgaaagcttcaatgccccagcctaactcgacacgaatcccacttgcatacgtgcacaagaaagaacgtgacacattctatgagattcaagcagccgatttgcccccggtgatccgtcaaaatttgaacccgaggcacaaacccaaagtccgggtgacaaccgatgaacgaacaggtgaaattctcgcaaaaatcgtcaaatgtcgagttgccgacatggacgtctgcagtccgcggacgactgtggactggcgcgtcagtgtcaatctggaaatggaatacacaggcgatgtcagcaatctcccagtgatagatgcagcggtcgtgaaaggcgcacgaggggatcgcatcaaggatcgcatgagctaccgtcacttggcgtaccaggtggacttgactcaggtagccaaatccgatgtaagtttatccaactgttctgtgtcaccctcaaagcagtctgctgaccatattacagcaacaaccgggcaagaatgagttcgagcacgagcttgaagttgaggtctcggctgatgagattcgtcgtcagggcaagcttgctatgtcgggcgatcccaagaaccagtacgaggatcttgtcaagggctttgtggataatattcgtctgctggctcgagcggtgccgccataatggtctttaccgctttgtactatgtatttttttctgattcaggctttactggggtttagtttgtggttcactgcagatatggtttttcgttttatggtaaaaagtacgcattgcaatagacatcatgcatgggttctatgttgtttctagagcgacatcgttacctagacaagggaatgtcccaatccatcatttggttcgcctcggtttgacaaaatatatcctgtgtagatgttctataaaagaaactaatacccatcccatagtacttgacgaccgattcgagaaccttgaagacagcatcactgtatatatgctccacatatggtaccgatgaatcttttagatactcaaaggtaccgtctacaactaaggtagtatcctcagtctgcgggtcgccaacattgaagcccatcggcccaataactagacgtatttcacaagcgacccgccaccacaagcgaccatctccagaacacatagtaattgtgataaattacaacctgatatctcaacaacggtggtctataagaggtttttcttatagctcaatactgacacacttgatttatgtaaggacttcaaatataaaggtaaatacctaggaagctttttgatcactgccaaacgagtaaaattactcaactaactagttagatacctgactatttcgtaagctaatcgctcggaataaggaataatagcaaacaggtaggtgactctatatactctgtacatgagtcactaagacatatgaaaaaaatatgaaaatgaatggatgtaggctttcagccatgcagctcacgaataaaaatatccaaaagttgaaaatcaccaagccggcagacgggaagtccatttctgcaagaattgaatgcgcttgctattcatggtcaggggacccattccccacgaatcgcccagccacatggtcttcgcagaggtcttggtgcttggcttaaactgcggcaacccatttccattagggtttccagtgcggatgaagttcgcccagtagttggccatcttgttctcgacagcatagtcctcgctgttccatgtaacattggagtacgaagcgtagggaatgttattgaaggtgtaccagagctcggagccgtggtaagcaccctcatcgtggttttcggcaggagcgtgagtgaagtagtaagtatacacgttactcttggcgccgcctgcagcccagtcggcggcccaacgccaggtgccgacgcggctgagatcacggtagaactctttagcgctttgcgacgcctgggagctattctcgccgggatacaaggcgaagaaatcgtctgaaaggtcgccaaagaggttgctgtagagatcgtggtagtcggaagacgtgtaagacaggtctgggctggctccggactcgtccttgttgcttccagtaaggatgggaatatcggcgtgagaattattgcgcaacgctcccgagtagttatccgtgaagacgtatccgtcgatattgggccgccacatagggggttccatgaatgtggcagagaggttagcgaaaggagtgccttcccaaatggtatcggagagcgagtcatattcaaggagagcctccatagacacattccgcaactgggcaatggatgtcacattcatttgcttgaggaacgcgactccctgctcttcagcggctttcttggtccgatagctagtggcaacagttccagtcatgggatcgtgtgttcctcgcgcaccactctctgatatgataccttcggcgaggccctcagctagcgggctccacatagcatcgagggcactagcagagccagcggattgcccgccgacggtaatttgattagggtcaccgccgaagagttgaatgttctcgttgacccagtgcagagctgcttgttgatccagaatgccatagttgccagaactgttgtggcctgattcagcagtaagttcggggtgggcgaggtatccaaatggccccaaacggtaatttaaggtcacaacgatgatgtccttttgtgccaggccagtgccatcgtatgtcttgacatcaccggaaccaccggtgaatcggcctccataaatccagaaaagcaccggcagcttcttggcggacatattggtctggttcttgtaggccggagtccaaacattgaggtaaagacagtcctcactggttgtggtcttgccactggagaagatgccagcatcgctgattgtttgcgcgcattgtggtccgaattcggtcgcattcagcgtgccccatttcgatggaccggcaacctttgtccaacggtttgcacctgtaggaggctgtgcataaggaatgcccttgtaaacgaaggctttgtcgcctccgcggaagggtgagagaccgccatggattgtaccgtagtgggtgtcgataaccggggggcttagggcagaggcgatggacgagccgcaggctgccacagtagcgagtgtggaaagcagcttcatggtaggtataaaagaaagaatgaatgaatgagataaagtgtcagacaaaaactaaagactgaagagaaagattgtgagctcgattgctacataggtaatgttacctttcctaatatattgagacatggaaatactcctaggagatgatgatacgcggccgctgagcaacgatctgccctccatgtttcctcatccgaaaaggacactgatgattatgtacagtttgggtataatctgcatctttagtgagcactcgtttcaaactttggtaggagactcggatataaatgtggagtcgcagatctccgtcggggctgcgttcttattcggggagatcgtaaaactccggcaggtacccgcatgtggagcacatcctttcctatccaggattagcctatttcccaattgaaaattactgaaaattactgaaaatgtattttttttgcatttgctctccttctatatctaccaatatgaactacagtcattatatatgtacatacatgtggctagttactatgggtagactttccacatgttgtcggagtatatcgccacacttgtaagactgttgtaaagatgctaacactgggctaatgctgtccttgcatcggaagtctcaatgtgtcttcaagactgcttaatgccccttactgttcatagtgggctaagtttctttgtattgtgacctaggttatagctgcattctatatttagaatgaaatccattttggctcaggctgttgagtggaattgtgctcggccgaacaggtatcataaaagaacaaaattacggtgatggttacttaatttggtcaatatcttttttaaaaattatcttcattcgggaggaaactgcaatccctatccccaaaggcttatatcagagcctaatctaacctctgttccatcttaaataacaccagccgcaagacagagtcttgccaatggcgatagaatgtgttgaccataagtacttacaaggaacctatataacaaaattctgtctcacatggcagaacgctagaatcaagagtgaaagttgcccagtttagtactcgtgcaaagtggacatccagcgacggaggaaggcgatgcgtttcttcgacgcggcgattggaaccgcaccaaaggagtcgccgagttgcatagcagagtagttgctggaagacgcagggaagtgaactaaaccatctccgttggggttacccgtgcggataaagttggcccagtactcggatataaccgattcaatcttgtaatcggtggcattccaagtgacattggagtagtcggagtaaggaatgttgttgaaagcgtaccagagctcagcaccgtggtatgcgccacccgagccctctgcaggagacgaggtgaagtagtacacgaagacatccttctttgcacctccggcagcccattcggcggcccattcccaagttccaacacgggccatatcgagcagtacagcatcgctattagcgctggcctgggtgtcggtcttggcagggtagagagagaagaactcggcggagtagttaccgaacacctttgtccacaaagtcttgtaagtggaaacggtagaggcacctccatcattctcgttcttgttgttaccagtcatgatgggcacatcggcgtgggcgttcagctccaaagattcgccgtatccgtgacggagcacgtagccgtcaataacgggacgccagcggggaggtccggacaagaggtcagagaaggcagtgccctcaaagtagtcgtcttccatcaattggccctctccgataaggtcagccatagggagcttgcgaagctcggcaatcgacgagacgttcatggtcttcaggaaagtgacaccaaaggcctcagcaacggctttggtgttgtagctagtagcaacaccaccagtggcagggtcatgaggtccacgagcaccactttcggaaataacaccgtgaatcaaaccgcgactgagaggactccacatcatgtccaatgcactagcagatcctgcagattggccgccaacggtgacttggctggcgtttccaccaaagtgggcaatgttgtcttgaacccagcggagagcaaactgctggtccaaaataccgtaatttccagagctattgtgtccagactcagtcgataggtcggggtgagcaaggaagccaaaggcaccgaggcggtagttcaaagtaacaacaatgatatctttggacgcaagaccggttccatcataggtgatgacatctccggagcctccctcgaaacggccgccgaagatccaaacgtagacagggaggtttttgttcttaatctcagtagcggaggtggtgttgtaggtaggggtccagatgttcagggtcaaacagtcctcactggttgaattcttcccagaagagaaaataccagcgtcggagtatggctgggcacactgaggaccgaactcagttgcgttgagtgtctcggtccatgagtcgggcttggtgggaggagtccaacgcttcgacccggtgggaggtgcggcataaggaatgcccttgtagacagttacgccgtcccggaaaggcgatgctgcacccttgaccggtccatagttactttggatgacggggaaaacggccgccgcggcgaaggccggggtggcaaggagaatagaaaggaaggtcaacattggaaccttgaagatgttctcgattgactgttatgcgaggtacagattaactgaggggtgatcagcaagaccttatatatagtccatggatatcgatcgagccctactcaaaatagtttcatgtagaatcgataattacgcggactctaggctaagcccatgtggagctcatattggagaatgcttgcctggagatggaactgcccctgagtatgactggtacttaccgatatccacactgtaggagagaccaatggctgtctgtcgggcttcgacatgcgccgcgcggcatccctgaagaaacatgtttatttgacgcgacggttgatctgcagtggctgtactccaccgatacaaaagaaaaacaaattggttctgaaaatgacgaagccggcaagaaagtgtctccgaatatgccgaatgtccgagacaccctagtcccaatatggaagtccacaccgaagtaaatatcttcttcggcttctttggccagctaatacgatacctcgatgtttcacgtcattatttggtttcgcagaagtgtcattccattttgcatgaagcagatccggaaaattatgcttccagaatatttctcgcctatcatcattgattgagatcgacaaaagtctggagaaattgatacgatttatatgaatataataaatcccccacagttatatgtcaatctgactgaaatccttgggttaattgcttagtgggatcatcggtataggtgcctgaaagaggacataaaggagcagagactgaatccacttccgtcttacgatatggaagatctacagcgttgaatttcccagctacaccatcatccaatgcttgaatagactctccagtttgatcagtggcaccaacccgttcaaccacttcggcaactcgaaacccgaaggtgtcgtatgacctaacgctttcctcctaggcatatacaaaatagaacgggttgttgtgaacttgtttcgatatctatttaatcgctcccacgcccagtcctcgtgattgtagtgaaggatgcatagcaacaacctcacggcaacataacttttgtcggcagtagcctgcctccgataacttcaaactggcttcatgtctgccgagcatttcaaaatgttaagaggaccgcgccaacagaacaaaagatagcgcttcgtaccttgttaccatgtgctagtgtaagtccaaccatcacaacttgcaaacaaaccatattcgcgatatggcccagagagttaataagcgacagcctggttaactaaatagagtgttcctgcttctggtattctatggtagcctgtatatggctctggcgcgtagccctaattggttctgggccgtttgccctggatccgacggcatccgacataatgcaggactcggttctctgcttctgaattccacggcaattcttttctaatgaaacgtacattagtacaatcaaacacctctctccagtccattcataaaaatctccttttcatgaccctaagaccaatacaaacgcacgctattcccaatctggaagtctgacgcaacagatactcacctgcaaccacgaaaggtccgaagggaacagcagaagttaacagacctccatcagccatttgaccatagtccattgtacctcaaggccctttctctccgcacctccaatgggtgtgaaactcttggataatatccggatcacagaatacatggcttatcgatctacctgcattctcaagtaggtggtattggcggcactggggtaaagaatatcagtgcagccactactgggacttccaaggggatttggctatatatcaagggtttggtcacgtattccaagagcagtcgagacctaaatctctgttggcacactgataaactggagtctggcacacatcattatctctggaacatactcttcaactctacgcacgtctacagttcacgatatggataggttccacgctgtatcctcttttgaggatgaaatagaccagcctccgggcacatttaaacttattggaggtgaggctccttttctcctagattggagtgtttattgacagtatcctgatccagacgacgcgggagatgaggatgggcaatgcatggtccttctctatccgattccctcgtctgacccgaatgtacctctagtgagtcggcactggattcatatctccctgattgagctaattccaacgcatatggatagaactggagcaccatgcgaaaatcagtcaatttcacaattgtgttggctatgacaattgttatcttcacggcgtaagtgaggaggacaatcatctcagattggccagactggtaacattgctcccatctcaggttatcgatccaagccatcttttggcagcagatgaccgttgacctggaagtcacctataccgaattgaacaaagccatgtcggtaaatttcgtcggtctcacaactggttgcatcttctttatcccccttgcgaaaaagtacggccgacggccagtttatatcgtctcaacagcactaatgttgactacgtcattttggacatctaaaatgaacagtttgacagagctgtacttgaccaacttactgcaaggtttagctggtgcaaccaacgagtcgatagcagagataacagtgagctatgtctttgggccgatagtaagatgtcctgttaatgttgtacagattgccgacttattcttcgtgcatgatcgggggagtatgaatggactatacctgacatgtgtcatgattggtgtaagtctctcaaccaaatagcccggagatttatgcaggtacctgatgaaagcacgtatagagcttcttgacccccatggctgcaggggcacaagctacacagtatggctggcgctcttcttatcaaacaatgggaatcttcaatggtgtccttttcgtcctcttcctcttcatctacgaggaaacaaaatttgtctctgtgtttattgggcaagcccgtgctaccgttgaagaagctgatcaactggtctcaatcagagaagatggttcggacaattttgactcggggtcttccgccaagggcccttctgtcactgaacatactcgttctcaccatgtgctggacctcactataccgcggaactcctggcgcaaacgccttgccctggtaacgccaacaccagaaccaatttggccgcacttctaccgccccttctgcgtgctcatctttcccgctgtggcatttgctgcgtttcaatacgcggctggaatagcctggctgacggtaacttccagcgtcttgtcactcacattcccagagccaccatacctcttctcacctgcgcaaatcggatacactagcgctggtcccctggtcggaaacattatcggtgcagtgtacggcgggttccttggtgatcggtcgattttgtactacgcaaaacgaaaccggggttattacgaaccagaaatgaggttgtatatcttacaccttccagcgattttcatgacaggtggccttatcatgttcggtgcgacgatttctagggtaggtaacggcattaaaagtcaagttcccatttgggcttgggctctgttggtgagtgagtgctaacatgctattttccggattgcaggggatgcactggatctggcccaatattgcaggtgcctttttcggatttggtttaggcagtattagtgatgctgcactggtgctagtcatggacagttacagggaggtatgattatctcatttcgatatacatgatacttcttttgtttcaagtgagccgtttctactaactcctatttctagatcactggtgacgctttcaccgccgtgacgttcatgcgcaacgcggtcggtattgcaattccattcgcgatctctccgtggatccagcgcaacggcatacagaatatgttcatcgcgtgcgggatgctgagtctagctattactgggacgattatcccaatggtcctttggggcaagtccggtcggcgcgcattggcaggccgatatcgcgatattgtgaagaatggccatgctggttgacggatgtttaagtgaattttgcctgcgtgttttttctttggcgacgcggacttcctaggtgtaatttggttgcctgaattggggccgggtgatattgggctatgtcccccgggatatgttgcgaattgggtatttgatggttagatctttcattggataatttaaatgatatggatttttaccattcatggccatgaagttgcggcattgtatgtcttttcgaagagattcctgaagttgtacgagatgatacattgcagtggcttgaggattccttgataggatacatagtacaaggcactccaatttcgtcaatgtccgttggtcataggtttcacatttattcctggtttagaacatggaagcctgatctgaaggagagagcaggaatatgagaaaacccctaaccctaactcatacacgacaggacttagaatattattgcaatgtgattttgtttaactaggaaaggtgataggccgagaaaaagaatctacgtagtcagatgaacaaatgtatgcgtaagaggcaatttaaagattcgccttgtgcacgtcatcaccaacctctttcggcaacgccgcctcagcaaatctctcctccgacacaagcagctgctcagggaaccacgagagatccgaactgatcgtttcaccgagggaaggatcctgggcgagcaacatagtcgccaccgccttaccaccaagccaagcctgaaccattccgtctccaccaaacgcagcacaaacccactctgccccctcagacccatgctcagcccgacctgtcacagctccaggcaaccgtcctacccacgggaacccatcggagctgaaagccatactgccagtccacatcgcttgcactgagtcgccttgcacacggccccagtctttgcttccgaagatggcacgcagagccccagacaaatgaatatcaatgtaaagactaagatcagagtctgtcgagacgcccagatccgctaggccaccgtcctcgctctgcacgaagcctccgccgagcatcatctgtccctccggcagctgggtcatgtagtcgaacccgcggtcgtagttgaagagccacgaatgatcatctgcctgattggggaaattgtcaccgggggtctgcgcggacatttggccgcgaacggggaagattcggccccgaaatccgggtacaaggtggctgacatgggcattggtgcagtgaatgacgtgccgggtggttatggtgcctctgcttgtcttgaccatgtatcgttggctgttggcggtagtttcatcgtgtatagcggtcacggcggtgttttcctcgacgtggaagtgatccgggaagtccgcaagcagacgcgtgaggatgccggtgacaaatttgtagggccagagggcacctgcggggccggcgatgacacctcgggcacgagtcaaacagaattcctagaaacgacattagcggcacttggagcgttcggtatgaatgatcaacttaccttcgggatattgtctccctcataagatgtccattcagcggcttcctccggcatttcctccttgaaacggtgcatccgctccaaagccgtcttccaaggtttatcgcggaaatagatgctcaggaaccgaacctttcgtgcttgcgtctctgccgtgatgccaagctcctctgcgacagtgagcatctcccggagatgcgccaatcggaagcggatgagattacgcgcggcatccacgccaaggacatcggcgaatctactatattcgtcggctgtctccaggatgtgaccgccattgcggccggttgcgccgctgcacactgtgcgagcttcgagcatgacaatggatgggtgggaggtggaagagtgctgcgaagcgcagttctggagcaagttccgcgcaatagatgctccagtaataccagatccgatgatgacaatatctgcttccttgcgcagatgcttagctccctggctgaagttgtgtgggtttcgagtccagaacgacgaggtcgtcgaactttgggggaggcctgggtcggagtagatgcgattgagagcttgctgtctagcagaggctgaaactgaggggtctgtcaaaatatctgtagcaaaaggcatggttgctgaaacgtcaaagccacaatagagaggaaaagaagagagataggcgggagagaataagtaactcgcaaggagccagagtaggagatgacaacactccccaggtcttacgcgagatcgagaagataggtgggaagattataaaagaaaacaaaaaaaggaggctgaagtagtcaggcccaccattagatcgcaaaacagaagtagcaatcagaagtagcctttggatttgcctacctggtacctacaacagtaccgaggttgacttaccatgctgatgcacctattgactcccataatgaggtaatctcttctcaagggtttcctgtccgcggataccacctgagcacctgcatatgccccatctgatagagttcaagataaggcgctggtgggtcaatcttgtcgttgattgtggggattttagaacacatctgaacaccataagatcatgagaattacgggtatcgttagggtacactcactagctttttttccggttttgtatctaactctcattctaacttgggaagaggccgaggtcttgttacatttcacattgaatttaagccggttcgcgcggttagctgaatcgggtaataatgtgacttgatgttcgatctgggaatacctggatcgatgtgttttattcgagcaatttcccctcgacatcaagcctaagagatggtggtcaagtaaatacaaccaataaagtgaatttgaggttggagaggggcttgaataaatgacagcatacagaggggttgcatttccggttagagagttggagactttagagtctattatagctgacattcactctacgtcattatctttctaatatttgataatattaccatgcaagaatagtagaaatgaaaatgaagcgatgtgattgtacaacccgagtgttatcgcagactcgtttagactcaagcatcaccaagccatgtgggaaaccaagataagtgaaaaaagcggaggtggttacatcgtatcgcagccgagcaataaagtacatagaacgtacataaatagggagatagccataaagtcacaaacgtgaaaccacatctaccccacctctagaatgacatccaaagcacaccccagcagctggcaagtcctcgtcgctgccaaacaccatgaatgcgaacagaaaattccccgagactggcttctcagcgcagaccagctggcgctcgcgcaggaaacccctcgtctactagatattgatcttcctcgtcgcagtaatctgctctcggatatcgaattagagttgacagaaagttataccgcaattcagctgttggacaggctggcatcggggcacatcagttcgttggctgtcacaacggcattttgtaagcgggctgctattgcgcagcaggttgtgagtacagcgcattactgaaaggataaaggagcagtgggcttaatatatattttgtacagacctcatgtctcacagagaccttcttccccgaggcgctagagcgcgccaagtacctggatcagcacctccagcgggagggaaagcccattggtgcgctacatggcctgcccatcagcatcaaagacagtttctgcgtcgaaggtgtgcagtcaaccataggatatgtcgcatttctcgagaatgagcccgcgaagacgaactccgcgctagtggagatgctgctacagcttggcgcggtgttatacgtgaagacgaacatcccacagacaatgatggtaaaaaaacaccaaatgactcggaatatggtcaataagtgaatctaataatcacccagacagcagactcggagaataacatcttcggccgcacccttaatccacacaagacaaccctaacagcgggcggatctagcggcggcgagggtgcactaatagcattccgggggtcaattctgggcgtggggactgacatcggtggctcgattcgcattcccgcgctatgctgcggtgtatacggctttaagccaacaagcaaccgtataccctacggcggacaggtctccggcgccgtacaggggattccaaacttgattccagctgcaggtcctctggcacataacatcgccgatatcaagctgctgattggttccatcgtcgctgatggccaggcgtggaagtatgactctgctgccgttggagtcccgtggcaaaccatcccgcctggtatcaacgccagcaaaagcttgaccatcggcatgcttgctgaggataagcatttcccgcttcatccgcctgtaaagagggctctaaatcgggcgtttgaggccttgacgcgcacaggacatcatgtcgtccgaattggtggtgacgatgaagcacagagtttggcatatgcgtcacgtgttgcgtttcagtatttcaactacggcccgcacaaggatcttgtttcggccagtggggagcccgttgtgacttcggttgctaaggctgcgggaccgatgtcctctggcccgttccctgctcagcaaggtctaggaccgtttgagactatacaggcgttgcatgtggctcgccaacggattcatgatgtttggagacagacatgggtggaccagaagcttgatgtgattctggctcctggagctcagagcacagctgtgagccatgatacgtatggatggcctgcttatacggtgatatggaacgtcttggatgtaagtctttctttcttattctgcttgcttgaccttgattctctgaggtctataccaactttcgccgatctagtatcccgcatgcattattccatttggaaaagcgtccaaagagcttgatcccgatcctatgacaacaagtaacgatgcgcaaccagactgtcagtgaacccgtctcttttatcgaatagattactgacaggtaccagatcaccccgatgaggtagatggcgccccatgcgctatccaggtcattacgccgcgcttccaagatgagaagtgcctgtgggcggcggatatcattgaccgtgtattggccgttcatggcaaggaataatggaaagctatatggctgttggcactgcgcccacctagtcttcttaggcgaaagtctggctggatggctaggtatgctcggaaaattcatgggtatgccattcaagatcatacgagtttagtgactaggaaatatcatttggcgccggttgctgttctgcaagaaactaaattcaaaaggtagaatacatatgtgaaaccggttctgctccgtttgatatcttaaaaggagtgtggaaaggacaagatgttggtacttggaagagaaaagaggacaagaactacggactcgggctatcgtcgtaccgtggtcctccgtcattgccaccatacccggcaccaggtgtagcagccattccacccatcgccggagtgggcgcatcaaacgcggcaggggttggagcgtcatagtctcgttttgaggggccaccgggagtgggtgcgctgaaagctccaccaggggtgggggcactttcggcccatccgccaggagttggcgcgccaggggtcggagcagcgtatgcaccaggggtgggagcggagtagtttccaccaggggtcggggcatcgtcaaaatcacgttggtctctgccgccggacatgctgttccagccgggagtccggccgcctgtggcaccaccggcattccagccaggagtccgagatccagaggcgaaggcatcgaagccggagctggagtcgtatggtgtcttagatcctgatgtccaggacggggtgcgactgccaactcctccatatgcggtacggtttccgtcatacgggttcgcggtacgagagccgtcattcttccaggctggagtacggctgccattcaagccaccccaagcaggagctatataatgatgattagcaacttcatcaacttttccaagatgattgtactcacttctcgcagcagcgccactccaagcgggggtcctagatgaatcggcggcgattggtgttcggccaccagcccagctatctctcccaggaccgcccgaagaagtgtgtggagttcgccctccagggccacctcctcctcttccgcggcccatagagagaggctgtttggaaacgggactgtgaaaagttaaaaacactgtggaccaaagcaatggaggagtaacatactctttaggtgttaaaatttcacgcgggatgtgtacgggcttgttagatgtgtaaagttcaacttgtgcagagctgtcgtccgcgtcgcggacaataccgacgagacccttataacgacccttgcggatagtcacagtctttccgatcagctgatcgcggccgcgacggggtggtggcattgcggcaccacctccaggggtttgcattgccagggcagggttcatcttggtgagatcaggtccagtgggccgaccacctcttgctgatacggtaacaacattcgttgtccgcacgacggagatacctgcgttctcggcttgcgccttattatgcaagaaaaggaacgaacggtgaatgtgacggatgactccactgcgctgctctccgtagacctcacgaacagtatcaccacttcgaatctctgcgccattgcgatcagtagccacagcgtcgcgacggggctcaatcttgtttgcgatttgcgtaggaagaatgttgcggatagaaccattctggtctatcacacggagggactcccggtccactttgatgacacaagcaacagtggcggcatcgagctgaacgagatcatgaacatcgtagatgccgagttgtccatcggcagccatctcagcagaaagtcgaagatccttgctgaaaattgtgatctcctgcatactcatatcgctgagaagagtgacggtgtcatccttgacctgcacgaccatgcccaattcgttctgatatcgactgccgccgataaccttgacgtgatcaccttcacggaatcgtttacggagagttcgaacaggagcgtcgattgtctgaccggccagttcgccctccgtgacttgcaatgaaataatgtcacctcgagttgacactgtgcgaccaataagaccctgctgttcaccccggtaaacctccactggatcacccggttggtatgagtcttcggcggtggagttcttcagagtctcggccagtgacgccagatccagattggcagtcccatcttctcctccacgcgcgaacattgtaacctcctctagccgggggttcacattcttggcattcaagtgctgaacacgcatatccttaatcaggaacccatccacgtagttgtcgttcaagtagttccatgattttccacctagaccagaagtagacgaaagatattttgcgtgcttctttttcgcctctgtctcactgaagagacgctggggagggcggactgtgttgacagcaccgcgtttgcgtttagcatcggcggcaggggcaccaaaagcatcgtcattcatgccatagtccaatcgaggaacaagtctgacagtgacattcaatccattggtttcgacctcctcaatctgggccagatcgcccatgtatttgccacgcttgatgcgaatccaaccaccaggcaaaagctcttctgatttctggacgcgaagaagatctggcatctccttcactggaactagggtcagcttttgggatgggtagtagaagttaatggcctccaagccttcagtaacatcggcctgcctgcgcgcttcacagtagaaccagccttgcataatgtttccgcgttcaaaagccgagatgattcgaatgggattgcgggagcccgctgggcgctcttcaattcgtttctgaattgaatatacgacctccttttccttgccaggcttgcagcgaccaccccaaatgctcgggtcttccacgctggggagcaggagtcgtttcgggatcacaagggaatctgttgcggcagcacggttgcgtccatatcgttccttcagcatctgtgcttgcttctctgcgtccatgctagcgtcaatctcgcgctgacgatccagttgtcgatggcggcggtcgtctgtctcggtgccttgaggtagcgcgtcaagatcatccgggtgtgtttccatgccatattcggcgagctcatcttcctcatcatcggcctcgtcctcctcgtcatcgacaccggcctcgtcttcgatgaatggattggcaacgcgcttcattcgcttttgtggacgactcgcctgaaatcgaagatacgcgttaataaagatatcctccattactaggtctccatagagaacataccacatcctcttcctcatcttcgtcttcctcctcgtcgtcatcgtccacttcattctcgatctcctcgtcgtcttcgacatccttggcatcgtcctcttcatttgcatgtgtgtcgcgagggtatttcacatcgtcctgctcatcagcgccatcgccacctgagtgttctttcttggttggctgtttcgcactcatttgttagcgttttgtccatcgaggtttgaccgaaatgcatagaccgaccttgactttgagatcctcggcatcagactcttcttggggagcagggttaaagtcatcctcctcgtcctcggagccgaagtcttggttgagaaagtttgacattttggcaggtagtatctagcgcgctattgcagataatccggtcgccactttcgacagtatttagagttcgatatagtcggatttctatcaatcaccaggaatattagtgaccgaaaagacgaagcaaacatgcgaggaagacaaaccgtacccaaggaaaccgcgctacaacttgaaggctgggagatagatgtggataacaggatgcaaagtgtcaagtattttctgacggacagccaattccgcgcggcgtgaagtcaattgaggttgatccaaacgagagaaaagcgactggaaagttgagaggaggcacagcagacagttgacctctgcgggcaatcaccgagttccgcgaccgcttacaaagaacactgatcagaatggagacctctgggtttgtgagaagaaaaaatagcctgaccacaatgcaggctgaattatacctcttcttataaaggatagtttgagaaagggaaaataaggaattgaagtgctggggcgtggaggtcgagttgcccagaggcacaatccttgcgtagatggtcattgtggtgcgccgtacttggccgccttttgagtccagcactactgatgatcgtcggacacgttgacccacttttctctactttctctatatccaaatccccattcgaggatttacttcattttgacagcactcggaggtccaaactaccaaacggactatgacaagtgctacacgacacgcgagtcccctatttatcacgcgtcggaaaacgtagactaatcctgtgatcagactcctccatctggatagacaatagacccagaagaactcgactacgcaggtgacaggccaccggaggatggctgaagttacgaagttgcccagataggtggagagcttgttccattgacttccccgtcaaccttggatgaagtcattgatgtgatcaataagcgcggtctacagtcagtgaagtccaagaaggcacgaaaagtaaattttcgcaaacgatgtacaacatagcaatatgaattccaggcaatatgccctatatgatatgattaatgatctcgggctaatcctatgctatcttgaaggtttcccttattgaacatatttaataaccatgtgtggcagtaagcttggtgggggaagaagatgatgatattatgaaccccttggtgggggtgctatagcctatagctaactatgactaagtacctgtgataatatgctgggcctcaaaaaatctcggcctccggctgagaaaaaaaagaaaattttaataaaaaaaaataataagaaaacgaaaaggtaaaggtgcgatgtggcgtattagttgttgtatacctggggcggagtgtagatatatgagggcgtgaatttatacctggggttgtacagtggacccttggtagccgcttcgagaggagcttggcagtggttattatattctttattatctagtagtaataggttctctggtactgtcaggaccccagtactaagaaggctgatgcctgaagtatgagacctgtcacagtacgtggaagcacccgtcccgggtacgtgggggactatggactggacaggagcaatatgtgctgcctacatagtccctgtaggtcatgtaacccacaacctatatattatcctcgcatactacttctttagagaggcagctattagttccaatataccactgtatatactactatctctatttcccaatcctctattatatacagcattcccttaggcattctatacctaggggtctcaagatttcttataccctctatatagtatctatatagtactctttagggtactctttaacgctatcttagataaataagttatatcctattaatactttatatagtaactttctagttatactataagttattatattatatataaatactgcgataggaagctggtatacctagctatcttactcctagttagatatcggcaaagcccacccggcccaccaatgggctgggctttgggctgacttcttcggcccacgctaaattatgggctgataccctaggcccatagcccacgatgggggcccatatgggccttatataatacagtgatctacctacataattaatgcaattttaggcctgtattcttattacagcgctctcgtccaattataattcatacatatgctaagcatatgcctagcatagttaccaatatatatttaataatatatctctgcgatattctgatatatatatatttctaccataccaattgttacgaccccgagggtcacttgcacaactggcccatatgggccgatatacttgctaagtaagcgccaggggtatatacacaccgcgcacatgagatttagaaccttagcgattagtctactgaattgtataacccacgctagggacctccactctaattcaaacctccatttttaggatacactggtagctagtcctaacattctaatcgcttcatttttacgaattagaccactggaacccataagatacctcgaaatacccgtagcagaagccgggtgttatagggagatatacccctacctgccggttaagaaaaccaaacgtaggatttacaaacccctactgagataggggccatacctgccaaaagagccgctcctataaaagagggggctgcctaaccgataaaattggcaccagctttaagctgggatcttctgggctcgacaatttccctcaaagctcaccacgaatgcatgggagctttgaatttgcgcttcgatttgcacaagataaccaagacgtcagcagtgatgaggacgacaggaaggaacctataatcgatgatcgatttgctaggctggtgtcccatggccgcagctttatcgaagagagtgctgcttttcagaagttgcgagtggaactcaaaaacttcctcatgccgactttcaagcctatcttcctagatttcagattcgattcagatgaatggatgataagatgcttctggtgcatggaaaaacttctatcaagcatcgggcctttagaggagagtgattcgtcacatctattttctacccgaccttcagttctgacaccatctcgagagatagtactcttttctgagcctatagctcttgatacgaacgtccattccacagagctacctaccccttggtccagcattcaagttatcggaaatctgggtcttagcttcaaactcaaccgcttgcagtgggcgcggtaagaatatcgtggaaccctcaagagcttttttccagcttcggtttgcaaaatttgaatcccttaccacaacatcaaatagtgctactatgccaaccatgttgtcaaagtgaaccttattataaaagttcgacgcgtttcacgtgggagtacgtgggagtggaaagcaatgtcgatatgaaagacttcaagggaacaatatcctgggacccagccaaacttctacgcaaactctacttgcgagagaaaaaagtcccgaagtatcacaaacggtttaggtggaagaatgtgaggtccaactaccttgcaagctcatcaaagtgctaataatcaacagcgacacggtaaaaggttatatgatgattacattgaacacgagcatggtgctctccaagccctccataactacctggatgctaccactgttcctaacaaagggatgacgcccagtgaaagtgtccagagctcctcatatgcggcccgtctctatacaccaaatgccccttccacacaaactacatatccattaacgaccattgatatcgctgaccagcctgcaaccaacccctacaattttgaaaccagcaacgtgttccatgatgttgaacaaccaactaaatccacacgctcactactcctcctcacttgcattaaacgccacggtcgacctgtcaaactccaccaagaatttgtcacgcacatcgccgacgaccgccaactcttccatgcattacgcaagatatattttaaccaccggcagaagtttgaattcttttggtctttgaggacattgcacagcatccattttatgagggtgtgtttttcttcttcatctaatgatgtcttgttttcttggtaccaaagctgggaccttacatcacctgccctaattttgacgtatatcatcctgacatatttttctcagttcatctacgctggcaactcatatattgacgtccgctgccatgctgaaatttgcactcccagtaatccttgcgcctgtgtcccacctcctggccttgttccaccccaggtgacctataactacacctaggtagacgactcttacctcaacgactgactaactgcatacccttacgataagccactgttcccgattggtgccggggaacaaaaagcacattttctccacggccatatcccggaacaatcgacaattttcagagctggctacttttgccttgtttatcttcactggatagtttctggccaatatatatttttcatgctatcggcggtatgcaaactcaagcaattcaaggttcttatttgcagctctctagtcgcattggcgatcttccgccagcctatatccaatccctggtaacctgctcctcaagagtagactgctgcagacgacgctcacgctgcttaacgccatggctaaactggcccagactgggtcgagtctgatatgccctccactggttttcacaggatataaaactccagcagccacaggtaaagcgatgagattataaaccaatgcccatgcgaagttgaacttgatcctcttaaagacaatgcgactgagatcgatcagtgtcagtaatgagtccaactgagacgaaacaagaatgaaatcggcagaggagatggcaatgtcggaaccagaaccgatcgcaactcccacatctgccattgtcaaggcgggggagtcatttatcccatcgcctacttgaatcaacgttcaacagtgctgtttcaatttttgtaatgaacactcaatgaaatttccttgtggcatcaccgcccgctgctgtctttccacgttcaacacatactgtagttgacgatgaaactaattgattgagaagaaaaaagaaagaaaaaagaaaagaaaaataaaattacactatcgttgattgattctcaacggaatttatgaccggaatccctgaccggaggaccttaagaaatgaaaatggtggaaatgaaataattcggacctccaaacaatgaggggcctaatgaggttgctcaaattttgatgagctagagtactgaagtgtacaagcgtgccggctggaaatcatccatccatgccccgtaaaaaatcaaagtaccagagttgatcaatgttgaatcaaaacaaataacgtcagccttcaagattaagggaacaaaaaacaccgaaaccgataaaacggaaccctcatggccgttgagtctgaatatttttatttcaccatgcttattgtttaagaaattaatgtatcccagcccgttggaaaaggccacccgcaacaactctagtaacatttgaccacaaccgttcttaaacctcagtgtaggccacacaatgtagatgtgccgttgagatggttgctcaaagagaaatcatgttcatgtgtgtgttgagtgatcaaattcatactgtaacttgttttcgtacccgttgtgctacagctgagtagtcgtataattcttctggcaaattcataccttataaaacctctctttttggccctttccctcgctgggttagtcacaacgtctttgcagcagcaggcgatcccgggcgatgaatacgatgaaaactacgaatcgctcgtccagaaaattgctgcgccaaaaacaatgtcgccgcaaaacaagtcttatgaaaaaagcatatgagtacagcaagttgtgcaacgcagatgtatgcatggggattcgcatgcgggagacgggccaggtacatattctgtcagcggattcttcgggcttttgggcttttcttgctttacaactagtaagctttattatgacgtcatgttaagaaataaaagctaatttgattagaactcctactatccgactccaaccttgacatccgaccgtgattttgagaagagcggggaggatgtaaaggtccaaactatgcaataagatttcaacttgttatctacttagaaaaatccagttctattgaaaataccgtccgttatgttgctcgttgcaaaaagccagctatgaactcgtgtagcttgaggctattaggagcggcggtgattactacagagcaggtgatcctaggccgtatccttctggctatggatctaagtactcagccagaaatggccaactagcgtccaaggtagcttagcagccttaattatctgaagtctggatttacttcagtgcacgctttcaatctttcgatttctatccttattatatcccataggcctactgtcgacgtttcgcaggtcgatgatgatcgctgttatgtcccatagaccagacctcaaagcggttagcgtgtctcacttcgttgctcataaatacactaatcccgaaaaggaaagtcggccactactactttcctagaaacttacagtatcggatcaggagtagagtagaatttacttctatgggccgggattcatggtgagacccataccagtaaagatactctgtaggaaagaatttcattatcattagcgattatttttctaatgcgaagctagaagttaaaacggggtggggcagggaaaccaaaatgagactggaagaacaagaatcaggaacttcggtacttcgtatatcctcgctttgcgcaagccggcgactggtgcaagagatattattctttttgaggagcagtgcgaacaatttcttcaaatggttgaattacccgaagagcaacaactgcgaccctccatatgagacgcgtctttccttcactccgtccatcgataagctcccactggagacgaacgttagaatcacctccaggagctaataccctcataaagttaagggccccggtcactgtggagtaattaagccaaagattttctttaggaccagggataccgtagacagcgctatagtctaaagagtaccgaatctctctagtaaataccctaagggtatcgccttcctagactaatataatagggcaaactgtgaggaattttttatccttaggctaaatagtgataaagatagacttatttcgcatcgcttctgcctttatttgtaagttaaagaacctaccgagcagtttagctgatactttatataatccgcttaattagaagatagtctcctctatactagagaaccacgggttaatagcgcagttctatacaatcccaggaatactaagtctatctattaagagcggttgccttaactatagtcttcctattaaatcgcctttactctccgcgaccactcgctcttccagttatttaatatagaagctatacctttcttcctagagtcggacaatctctattagagaaaccccagcttctaataaataacttttacagaagcggtcaaattcctttatatagtataaaagaatcttatcgatacctacgttccgtatatcgaacaatcctttctagaaaagacggcactacctttaattagcgaggctaagtctatagcccgcttctctcataaatcgctcggtagcaactttctcagccatcgtgaatttatctagagggcctttcgaagttagcaaatcctttaggtcaaggagctaggcgcctttcttaataatctcccaatatatggtttcgttaagccgagactatatacttttgcttacagagaatatattctcctaattgattagctagatagcatcggggtattataacttaataataccattcataaagctctgaatctcttcgaccttcgttatcaggcttacctgctttgaccgatgtccgtatcttctaagggaatcgttaagctttatacagttcacaagtatattctcaatgatcctatgcggtactttcgcgtattaagaaatgtctatggcggacaaagacgtcccatcctaaggtataatcattattacgttcgcctcggtcgtcaacgtaggttcggatagtatatcaccttcccgacttactacagagtgattcgcctcttgtgccgtatctttggcagtattatttcctttgtttcttcttttcttcttataagacggcgtatctagccctgagtagtccacttaacttcttttttcagatatagggaggaaccggtaagagccacgctttgcttctagatccggactagctctgggagtaagaagaggtggtggatctgttatgcctacctagagcctcttttcgcggactatacatgtcagtggaaatagtctgccaaggagcgttctgggcctcaccaaagtcagaaatgcctaggatgtgttgtttaataggttcatagttgcagtcgccgattccgcagaatacaagcaactcctgaactttccctgccgtcaaagactgaaaagcttcctccatggttgtattgtgctggggaagtcagtcacaagagaagttgtcgaggggagatgctgcgctgccgcgccaattttggttgcgcgggtgaaactaacccgaaacgggaaatctggagtctagaccctaccagaacaacatagaaaagaagggaaagcaaaagtgtgcgagctcaacgtacttcgcgaccacattgtgttcaatgtccggtatagtacacgtctcaagagaagtaataaaggagactccttgcgtgtgcgtgagcattcgacaacaagacgctcacattgtcctataacctctgctacgctgtctcccaaagtttcaccaaggcaacgatatggcccgtctcgacgtaggcgaccagttgaccgctattcgccggttgattgagttatccaatcaagcatgggtacctatggttcacattcgggaacatcgtgcaacttgggatagttgagccatattatgaattgcatcttgatcagaggagcagaggaactatgaatggtcgagatgtgtacttgaggaaaggacaggcttcacaattcatcgtttcgaaatgaaggccatattgaaattcagtgtgtttacattcctatcgtgtctgaagacaagctttacacttccaagagcccctgagcttgcgccttcagggggcaataatcgctatcatcatgatcatcctctctcttctctcatcttccccacaatctacgaaactcgttgcaccagcgagccgatcttcatggtgaaaccttggaatccgtatcactttctcatcaaagaactgtctcttgattctcccttttatgaacctatgtataagttagtccgaagtttcttatgatgtaatgaaagaatctctgaatctccatcaccgacgaccctatgtaccccactgcaaaggccaactacaccacctctgcagccaattaccctcatttccattctcttcctccccttccgccggcggccaaacagaattaaaaatgacctccaactgcgcagccccctcagacacccaacgacgggcactctgcttctgcatatgctttacggccttgacaccgaccagaaggtccgtctgaaccgtccaagacggagccggcgctttgaagatattgcaattcgacactattgatatgcttcttgcagcagctgcaggtgcactatacaagggatgaatctttaacttcgtgaggcactgacccctaacctggtgggagcggatgtgtgtaaatatagtcttggccagatccttgtcgatagcggagttaatcattgtgtctctgatgtaccagataggcacctcgaggccggtagaaggcaggggttgagacttctcaaattccgttaggtcgcgcggtggaactggggaggggggttcgatttcgttggggtccacaagcggtgggcagttcaggtagagctcgagagttgttagagctgggaacagggcgagcgcggtgtatgcgggtgtttcgaggccgcgattgcgttggatggcgatgcacagggtctggagggaggggcaatgggctgcaaggggatggatttcctcgacggaacatattgggcctgtcacactctggccttttgcgcggagtcggcggagtgtctgatggttcaagtcttgggagccgacgttgagctttagttcaagtagcgttgggccgtgcttgcgaagggcagtagacaggagggctggtttgtagctacccaggaggcagaggtatgtgagcggggggagggagtcgaacattgcctctacagctgtgtagaaggataactcgtcgtcttgcggtgggaagagagcgagggtgagtctatttagctgctggaagggacggagaccggcaatagcgcgcagtacttgggtctcttcgatgcagccaacggtccacgattttaagcagctgtaatctactagcttatcccacttgaggaactgcccagccggcattagggtattcagcggccacgctagctgttcaagctttgcacgcagtggttccaccccaacccttccctcaacaaccaccgtctcgctgaagtcttccttcgggccggcctgaccacccgcgacaatctgtaatgcaagtctcttgacatgcggtgcacgaataatcatatcttcaagaactctatctgggtgctccctgaagttcctgcgctccggatgctcgaaaagagtaacatgtacggtgtgcagctgcggcgatagaacccaatcgtctgtctttcgatacatgtctcccacttgaggactcaagtagacagatgatcgacaatctggatgatactgcctgatggccttgtgaagctcgacagggccgccgttggacataagaagatcaatatcccgcaattgagggaccttgtgaatgaggtcaattacctcggcgctctggttcgttgaacaacccctaaatttgggaatgctttgacctcccaaattctctgtcttaagcgaagcccggaggccgctgtaggcacgaagcactggtgcgcgcggtgggccgctaattggataccatgggacgatgatactgagtcgctttatgtgtacgagaacacggctggcttctggctgccagtgaaacttatgagaggcatcatctttgagtggacgtataatgatatgctcgtacaagagcggcctggcaattctgttccattcttggtccaccagggagagtgcagccaagctcttcatacattcatcgcccatctgcagatatggtcagatatcaacaccattggagaaaaggtcgacgtacatatctcgcaatcagacatttgatctctgatggcagtcggtccatgatttggtagaaaggtttgatgttgaacagagagtaaaaaaagctagctcggggaaaatggctttcttttacacagagcttacctaataccacgtaactaacgtaatccacggccgttcggaacaccccaaaacaccatactaaatgcgataaatgaccacttcatatctcaacaatcatatcaatcaatgataatatacttaaatgatagaatctagagagtatttttagcccacttgcgaagtgtaggaagattactggaagtattaattaagatgtatgtattcaccttaaagtgacgccgtattttgtagtaaagcattgaaataaacgtccagactgtttgaaactaaggctttctatttcgcatgctaagaagagtctgtatggttgttgagatatgaagtgggggaccctctcctttactactggtatttaccgcctgttacatgtattgtttctgcttgcgttacgtaccgtttttggagtacaagattgtcagtttccatcaaatagtaatacacgctcctacacatctctgaaaggtgtcccttcgggtccgtcccggtgtctgctacgactagagtgatggtttgtggtttgttccattactgctgaatcgacccgtgtacctagagtgcacagcccagagcgttcccctcttcactagttacttagtctacttcctacctagcgcaaaacacgtctagagctacacccatggatagaactcctgctctgctccaccttcctccacgggtacaacccaacaacaccctaactatcagcgatataaaataacatatgataacagggcgccatccccgcgctatcatccatatccacatcttcatccgagtccgagtcctccacatccaactccggaatatagcactgctcctcattcgtccaaatccgcaccttcgaaattgtcttcaagcccgtcaccggagtcacgctctgatccgcccccagtgccgttttatgattaatgagaaaccaagcctgcgggttcccgtttggcgttcccaggagcgcctgccccgtctccgtgctcatgtcaaactcccagtaaaacacctcggccgcggacgcgtcattcgccgtatcgatgctgatcgcttcctcgatgatcgcccgcgtgttcaagttcaccacgttcatctggaacatgtacttgatggtgctagggtcggaggcgcgcgccgcccactcgatccacatcacatctgacagctgctgaatggcgggaagggagtcagaggagtcccacttgccatcgacttggagctcttccttcttaaagccgggggaccaggcgaggtccacgattatggcgttgttggcggtattgtaccagcactggtagttggcgcccgtggcctacttatttgattagtatgtttatctccctgtgggttactttccggcaggtcaagtagaatggaaaagtagaatggaaaaggtgcaagcgaatttaccgggtgcgtactatccaccgccaccgtgtgctcccagttcacaaccacattgttggatggggaaatccccagctcgttgagcattgtctgcccaacatactggacaaagttctcggcaagaccggtgtacgggttttggtcgattgtccagccgcaggccgtaagctggtctcgggtcagcgccgttgcaacaatgctgcgatcgaacttaatcagggctgtggcgtcggagtacccggttgcacatatgaggccgctgcctttattcttgcaggtgtcgtagtatgcggaggttctcttggcgagactcttcacaggcaatgagaagccagaactgaagcgttcgtgtctggggaaggcttctgcccaggtgctgctcacgaagagggcatttatgagcaggaagagggtggctagggagaggccatgtttaaagagggtcatggttgggggtgctcatgcgtgagctggggtaagattggtaaaagagtgtagattgtagtgagagaatgaaggaatacaaggaaagaaaagaacgaatgccagtgtgcgatggaaggagaaaatgtcgagatttgtctaggtatagggagatgacaaggcgtaataaagagtaagtccctctgctaccgtatcatttggcgatgcctgctcttccgagggctgcggcgttccttgtcataacttccctcgctagcaactgcagctgagcatcatttctccttcacttctgagcagcctcttacaagcgagtactttcatcgtaatttccggaccctatccactattacactagctcgacaggaacatgtctttggacaccaaacccttcatcacggccggagacacgatcaaaacggcaagagtgtacgaggcatgtacccaagtttggctttaggttccatttcttcatattccaaattctctttcgtcagttcatagtccaggatttttcttcttgcacctaaatccctcaacatccagggccccttacaaataccatacactagccaccgtattaccaagaccataaaatagttacaggccgccgggcggagccatcacttagagcgcaatgctccattgctccactaacgcaacctgcgcctgatttgtccagggagctgctatggccattacactagccaaaatataatgtattcttcatatcaaatatcgccaaacgccggtcaaagtgtcggctttccggcggtcccggcggccgagagaaggtaggaactattggatactttagtgcatttatggagtgggtctcagacatactagaaagggagcttggataaaaatgtacctgtagtaaagtaagatgactttgagatctcaccgacggtcaaataaatgttgaaaatccaacgcagttgtcagcttttgataaaccacgcttaatgagataattgaaatttgaagcctgaaatcctcaaatctttattaactctaatgaggattcgaagaaattccgtatcgagaaagaaaacaaaagaaaaaagtatagaatattttgatttgtcaaaaattgccgaatgcggcgctggaatttccacaggaaatgccgaacattggacaaacaatggtgactcggaattgggtactagtagcatttgttccgaggactggaaactcgaattaatgtatcagccactttgatcaccagctgcaagattttcagcgaggagttagtccgaacttgaaggtccttcatgttcaggtcaattcattaggtaacatttaccactggcattgggagtagattgttaacatcacatgaaagattatacatgaaatattcttgctacatatgtacttgacactacttaaattatgggcctcttattcacaagtgcgagatgacatgttcaaattgcagtcccccggacttttctatatctaacttaagaaaagttcacgtcactgcccagtgactccacagtatgtcattgcttaattcatgggtttcagggtggagacttcagtgtgggaatgaggacataggtagacgtaacatgatatgaaaggctcgttcgtcagagtgtgatcgacatcttcaatcacgagataccaatacagacataatatccaacccacagagagctgcaagtgtcaccgacagtagggttccaatcgtaaaactcatccagagtgataccagcatcgctggcaatagttgcacactcgtctccactgataaccagatggtacgcatcacagttgtccaccatgccactctcaatgggcgaaggagtggctgatggggcggaagaagaaccggaagtcactgttgtggtcacaaaggtagtggcacgagcagtggttactactgccgagctagaacttgcagccacgccaacacagacatagtcatcaacccagagagaggcgcaggtactgccaacggctggattccaggcatagaagttggtcagactaatatcatagtcgctagcgatggttgcacaatcatcaccactgacgactagataaaactcgtcgcaatcactcaccatgccagtttggataggagagggagttgaagggactgaagggattgaagtcaaggccaaagatggagttgcagtcgtagatgggatatagctcaaggctgcagctggtacgggtacagaaggcgccacaaggtagctcgagggcaggtaagtgccaacgacaaagttcacctgtacgcagtagtatagatcaggaagcatttcacagcttgagccaagatccattacaagcgggttctaggtaggaaagcattagtaaaagtacaagtcatggcatcaagagtgtcatttctttacccattcttcaaactgtgcggcggtaatctcgtaaagcacttcgactgcctgacaagtcgacccttcctgatacaagtaccataaactgcaatcctcgctactgccgggggcggcaacaccggccgggctaacaagatagcctgcagcctgcccgagggaaaggctaagggcagacagagcccaataaaaagatttcatggcgtacatggaagaacaaacttgagattcggaacttgaacttctaaggttgaacttgaattttcgggttgggattttggatacaagtttggaatagatagacatcggaatatatatgataccactctcgagattgaatagcttggacttagaactcaatttctccgcaacacccggggcctatgtgcaagaagactccaccacctccgaaattccaaattcccaccgttttcacgggaacagagatttctggtcagaagaccactccgatagtcctcctagcgatggtcggagccgggaggtggggattagattgccaggaccgtgacatctagaaaaatcatcttcgtatccacagaagccgctttccatagagtcttcaacgaaggatgttttgaccaaatctagaaacaagtgccgtatattcactggtcagcggatcctgccaagaaaattccttaagtcaattttcacgaggcttgtcaggcttgtcacaagcttgtctcccgccgtaggctagatgtgccgaaaattaattaatgagagcaagttatcttttcacgttaagcaaagtcttcgctacatggcccaatcacctacctgtgtatgaatctggattgttccgtggagtgccgacgctaagcattggtgtgtgctatgtggagaccctgctcaggtgggattggtgtgtccatgtcaaacggccccacccggacattgcttatccttagaacctcaactagcttgtttagtgcagcagaatatgtaaacactcacatgtgggtaggttgttcggtaatttttgaattcggccagattccgaaatcctactaatttactgcagggctcgccttcccttcccatctccactccgagttacagcctagtaattgagactatactggaaagggagtctttaaccacatggaggagcaggagttgagatgatttcaacgtaaaccaatcagaaaaatccctcatctggtcctgcgctttgccaaatcattttcactgaatttagtctgaatcctagcttgaaaccgggattttcaactaaccttttgtatgacggtggatacaccgcttgaattgtcagtttaggaacgtctctacgctgacatttggtcctgagtttcccttgtttactaaatggtcattcctcggaagtaaagactcttcactgttctccatcaacctacctccctttgcctgagagaaggctatcctctcatttgtgaccctcagtggtctcttcttttctttttcttgttggcagactacctttgtcaattggcttcattcttgactctcgactttcattcattcctttttttactttccatttcatcatgcgatgggccggcagtttggccagtttcctggcatggacacttgtctcccaggccgtgcattgtatgtgcacgaatgtgaatccagctgaggtttcatcgtctgttagtgcgtacctggcagcaaaccccattgccacgcgccaggcaacccagacagctgatgcagcgagtatgatggcatccatcattgccggtgacttcaagcccagactcttcgcggcgagcaggagtcgatgcccagtaagctgcagcagcagtggcctcagctctactgcctggtcagtataccacagcgtcagacggcttgatctgtgtaacaacaccatgctgcttgatttcaacatgttcaatgagctggatgatccaaacacgcataccagtattgcagcttgtaccgcggactttgatttctcttcttcagtcacaggaagctcccaagacagcgcttgctcctcactttctgtcagccagtctacaaatatatcttctttggagctagcctcatctggatcaacatcctccactggcgtgtcagacattattgatgcccttgagcaactccaaaatttcttcactgtttctggctccggatgcgatgacgcgattcagatcgcctactcaggtcaggcggcagtcggtgtttttgttggctctggtcttcacagccagggtgtcatctcatctatactcaagaaatttatgacccaaattgagacagatggcaccattgccgaggagactctcattcaactatgcaagggctccacagctagatactctctcggcgtgttcgccagtaccgagggagatctcgtttccgtccagaaggcgattcagtcctggagcaatggcagttgtataacttcaatggaggagtccactcggaactggcagagcctctcgttcacggttgcatcctcgaatcaaaacttatcgtctctcagcaactctacgtattcaaccggaaatgcaattctgcctggtgcgaaacgctcagcttctcacccacagcatgcctactcacattcttatcttcattatggtcgtgcggtgaaaactcaactgcaagcccgtgacgatagtgacgaatgcaccaccattcaagctatatcgggtgatgacccaacctctctcgccagtgagtgtggcatcacggttgctgaatttgacgagtataattcttcactcaacatgacagacctccaagctggacagcacgtctgttgcacgaacggaactatgcctgattacacgcccaagcctgattccgatgacaactgctattcgtacacagtccagactgatgatacctgcacagctctggctgcggcctacgacatcactgtcgccgagatcgaggactggaacaccggaagcaatggaacgtggggctggatgggctgctcggacctgctggttggcagtcatatttgcttaagcagtgggtggccgccaatgccatcgaccatttcaaatgctgtttgtggtcctcaagtcaacggcactgccaatgcaacccatggtaccgatttgagcaccctcaacgagtgtcctctcaatgcatgctgcgatatctggggccagtgtggtatcaccgcagaattctgtaccaaatccaactctactacaggtaacccgggaacagcagccaaagatcaaaacggatgtatctccaactgcggtactgatattattgtcagtgatgccccagctgaaatatattctatcgcttattttgaagcatttgaccaaacccgaccatgtcttaccatgtccgttgatcaaattaacaccaccttctattctcatgtccactttgcctttgcaaccctcactagtagctatgctatcaatgtcaccggcatagaggaccagctttctcttttctcaaacatgactggcatcaagcgcgtcttgtcgattggcggatggtccttctctactgatgcatctacttatatgatcttccgcgatgcagttacttctgccaatcgtgacaccttgatcactaatgttgtagatttcttggagaagtgggacctcgacggcgtggactttgactgggagtatcctgatgagccagatattgagggaattccagcaggaaccacagcagatagcaccaattactatatcacactggacctgctgaagacctccatgccaatagggaagacattgtccctcactgtgccagcctccttctggtaccttgagagattccctatcgaggcaatcagtaccgtggctgattacattgtttacatgacctatgacttgcatggccagtgggactatgacaatgcttactctgacgacggatgctcagctggcaactgtttacgatcccatgtcaatctgaccgaaaccctcagcgctctgtctatgatcaccaaagcgggagtttcttccaacaaggtggccgttggaacggctagctacgctcgctcttttgaaatgacggaggctggctgctggaccgacatgtgcacctataccggacccgattcgggcgcctggccaggtccctgtacggacaccgcgggatatatctcgaattatgagctcgagctggtgatagcagagaacccgtctgcagttcagtactgggacaacagctcgtatactaacattttggtcttcaacgagactcaatgggctggatacatgaacgataccaacaaggcagtgcgaaccaccttatacgagagcctgaacttcttgggaacatcagactgggccgttgatctgcaatcggaggatggcaacgaagagagtgccggctctggtgtcatttacatcagctcgattatcttcaatgagactgacccagaagtggctggttacccgcccttcacgatggtatggcctatctcctcggttgagcccatggttgtcaacttccctccgtatccatatgtttatattgaggggggctatgggaccacttcttggcactccgtcccctcaagaactgttgacggaatgagctacttccagtggtcgggaccagcctcgggcgtcccgaccacaacgtacactcttacccccagctacagtccctcgccactgacaatcatcggtaatgatggtgatgtgcccattgtggtgtatccgccccctatcgagtcacccttcactacaccgtacgctgtcgttgatggccagagttacatggttatgagcggcacagccacaatcggtgatacgaacgggctttctattatcacgggcattccctctccagccgccacgccccagacagtcactaaagtcatttacgttgaagacccagtcagcaccgccagcaccgccagcacagcggccaacaacacggtagtagttgtggtattgcccactgacgattccggctctggtacgaataccctgccacagacaacctccatatcgggcaccatcatatatacttggtcagagcagcagatcgatagcttggccaccattcccacgactactaccatcacgacaaccaatgtcaacgacaaaacaaccactatcgggatcgtacctgtcaacaccggtggcttctactggtcgccagtttctgttcctgatattccattgccaacagtgcctttccctgatttggcgccgattcccactctcccttgctttaccctctttgatatcttcacaattgattgcccaccgagcgatgacacgaaaagcaaaagctccaaaaagactgtcaaatacacaagtgcaaaggaatcgcccacttgctctcccagtacggccaaatcctgcggtgtactctgcacatcaaattgtagtccttcatcgacatctacttcgacaacgacttcttctaccacttgcagctccgaatcaacagttacagactactgggtctcatgtgactctacagcatgctcaaccacaagcaccgccacggtcaccgggtgtcaagtgacagctagcacgacgaccacgggtgtctactgtgcagtcacctctatcaccaacatttggtccactgatgatcaaggtgaaaacggcggtgaatactttacctccagcacacaaaccattcccgaggaagttgtcgcagccggaactacctatattgctggttccgatggggccgtcacactcggcaatggagatgtcattactgttcctaccagcgtcgctggcacaaccactgttacccttggcacagttgttgctacagttgacccctccgaagtgactgtcgttgccgtggttgtgactagtgaagtagtcgaatctacttccgcaagctctacgtccaagactgaatctacaacgtcaacgaccaccaagaagactaccagtactaccacaacagtctccataccaactgccactgagttttgtgcaaagtatgttattgaaaacgaagacacctcattggacaagtacggttctgagtacgatgaatttgtatttgttatgtggggtatccagtgggacggacttggatcagcggatgctgaatccgagattgagggcatcttggaggattgtggtatcactgcagatattcatgttgcagttgatactaccgaatggggcacagtagcgatgtggaataacggcgaaaacgacgttatcaccccatgtgtcaaactgaaaatcaaggcattgggtggtggtacaccttcttgtaaatggatttataagacttctgaggatgtgaactacagtgccaaggattctgctgaagctgagatgacttggatctataacaatcacaaatctgtgatttcggcgccatatcctctggcaacctgaacaaattgatatgcaatctgatcttacaatcaggacagtcagtcaactttctttccacaaggttctcttacggttgttcaaccttgaaatgcttctttttgaagatggaacctcattcacttgtacttacatttttcttttatcattttgaatccttggctcatagctggtccaagtagtctacacagttccaacattttctctctgtaaattacatctcgcttcagaatcgtgtgtacagattgcatagtgatttcaaattttaagtggctaactaagctgcagcaatgagatacatacatgtatcccccttcagaaaaagtcttactgggccccataagacaaattttcatcgaatctggaatgcatgaacactatggagtcagtctgttgcacaaacactttccaatggaaacgaaccaacggcttgtggactaccgaaacatttcggcaccgtggactgtcaatgacaaaaacgctgtggtgtccaaatatgaaggcttcattgtccctcgatcattcaggtttttcgacaaaaaattgacaccaatcgaatttgaattctcttcattcttccctcaaggaaactgcgaccttgagttctttgagcggctctcgtgtcttctccatgatcacaacttggaaaacgtacttggagttcgatgcctagacaaatttgatcctgaactatccgtggaggtcactgagggcaagaccaacatcatgatatcgcggggatctgttcagaactcagagcttattgaagcattctggattttcagtaccgacgatgaccaaagatgccattgcagagaatcctgctggaaagattccgagggaaagcatatcgaagaccatggatgctcttgaggcagtagaagatgtcaagtttcctttggcaagctagtctgaacaacctgtcatagatttcatccttccggacaatggagattacgtcattgacatttgctattcttcggaagaatgacaagatttgaaaacacccaactatctgtatttcacaaagaaaactccatgtttttcctggcatccaggtctgggttccgtagcatgctagtaaagtttccctgctttgtttccacaaccccaaccggttcaaaaccaaatttagagtatagctgaacaccatcgggagaggataaaacaaaagtatgaagctcatttttgtccacaatgtcgcagagcattttcaagagcgtagaaccaacacctttccgttgatgatcagggtccacagccatgaatgtgatcccttgagataggttaatgaggctttgaaaggtcttaattggttgcgagcttactacatatttcattgtcatgccatttttggaacactctttgcctctccgctctgagcagtttggagatgccaagccatgagggcacgtccaaagaagggggggtccagctatcatgatgtcccatcttcctgctctgcctttcttcggagttgattatcgagtcatcttggatgaaattctgaccattaatcatcccctttgagaagacacctgagcaggtggtccaacctatcaatccgacaggtaggccatctgctccgcatgccttgtaaagcgattcgttctctcgacaaattgcttcatggattccatcaattgcccatttgatttcatcttcattgcaatcccactgctgttctgttgagagtgggaacataaagcgacggagcggactatctaggtgcgcaggaaattcgacccgtcgtacgagcacactcacatcctcacttttgacaggcgataaggagaatgccatttgttgctgacttgcaagaggaagttttgatctttgctggatgtcttgacgtacaagggagaacaactcacgatccacagatgagtcacatgcctcttactcagccaatagggcaaaatttcggaacgtggtcgttacagtacggactagtacgggcatagccaattgagtacttgagagtgtgaattgttatatactgctgaagatgcacaataaataagggggttgagcttagtaatggaggtgctgaatattccccgggcgcactagtaacatggcgaccctcttttgtcgacacaaaatccttgctagcaagcacagggaaataatttttgccattagtagctctcaaaaaacgtttgaggcaactaagcaatatgtagtaagcacctaggagtagatcgcaagttcccaggaatattctagcctccgagaaatactaacaagccccagccactttttcaatagcatcatgccaagccctaaagatcgctttgaggccctcgtgtttaaagtgaagataatatttgccaagcggatacacaatctagataacgttcaggaggtttcagatacgctatgtaggctcggccccgtcattccatcatttacatttcacccgcatcctttgacaaccctgtaacgcgggcacacgtcaacaggccctggacgaagcggactcagtacatgggtacatccaggatctctacggtgtacgcggcagagctcagagggctcgttttggcgctacagatagcactcgacacaccgccaacgtataccctgccagataaatgcgtcgccatattcacggacaaccaagccgctatccaagccattcggaaccccaagcacccatcgggacaatacattttggtcgaggctattcaagtactcgaacagcttcgagaacaaggatggcaaatacagttccgatggattccagcacatgtcggcgtgccaggtaacgaggcaccctaccaagcagcgaaagcggccaccggaagcaatccaagcacgggagcgagcactgagcgaccgccagaagcggactctctgcggacactcacggcaaccaccaagtcaatcatccgtcggttgatgagagatgagtgggatacggcctgggagaatgccaagcacgggagagagctctttaggctcgaggtgaggccagggaaggcgatactcgacacgcacattggcatatacagagcgatcagctccgccatcacacagatgcgcacgggcaagattggcctacgtgcatacctccacgccatcaacaaggccgactccgaccaatgcgaatgcggccacgggccgcaaaccgtacggcacgtcctgcttgagtgccgggactgggcagacgaacgacatcaaatgtgggcaggcagggctccatgcagacatcaaacgcattctctgtagcccgtcaatggcagtataagcagcaaagatgctcttgaggactgggctgctgggacaattccgagcagtgccatccacggtactaaaatatatatagcgaagaagagtgatttaaattgtttatcttacttgtttgaccagacaagcctgtacaagcttgctgctcattcgatttatacaggttcgcagaagtataacaagctaagaaaaacacgttagcaggatcgtgagcgattggtagctcagggactcgtgaggttatacggacctgccatgttagcctaccgccttcagtgagtgcaatagtgatccctgtacagagagtggggtctattgccaatgggaggcgctatgtaaccgcttgtctcttgtcgccgatccgttcaagtagtcatatgcatatttcgtatgtaaagctgtaagccatgtcaccgaaggtgcctgaaatcccgtcccaattcctccactgacgtagctgctggtctagattgtaagttggtaaaagcaagaaattatatgcattagttttacatgatgtgtaaattgctttaatgaatgaggccatataagttagttactctttcgatctatgtaggttcgcagaaggaccgcaaataaggagataggccattgtgtgcgattggtaggcccaggctgcgtgagactgcacggtcctgtattattgacctactgtgcgaaccaatcaggtctgtctgccgtacgctgctcattttccgtcgccttgggtgatctggttgacaagaagttagtagacgggttgctaaaatatacgctgtcgggcttatgagcgtaagtcttagacagtcagggggcttcacaagcactagagagaagttgggaatcccctagtaagcagggtaaagaaaaaattaactggcttatattactgacatgaatcgttcgcgtataaatgaagtgggattaaactaaattaagtttagttttgcagcttattgtgagtgacttcctctagtagtagcgcttattggctcagtaagtatcagcctcgtctacttttaggtatgcagccgcctatcgacgtgttaatttaataataacgacgctctcgacctaatgatatataacagctttgaccccgcttgtcatataggagataagctgatctgtaacgtccactagggtaatccttactaatctagccattcgaattttaacctaacgggttagctgtaggtagcgtagccgctggcataagaaaaatttggaaagtcaccatgtgggaaaagtttatacagcccttacgctaatgcatagattctagatattcaagagccagtcaattactgattcatgaggtatttaagaataggtccagaggagcctcaatgctaacgcgtcaagggctataattgtctagcgtttatcatctgtgctctgggccacttagatctgtcaggcttaagaggggatcataggcatctcaatctcgacagagcgatgccacctaacccttccgtaaatagtaagcgagtatggagttcacccactataagtactccaaagccccaacctgtgaaatgatttcccagtacattcatgattatcttattgaccaagcagtcttcaatttacaacccagattcgacctaaaaactcacagtcaaagcttcaaaatggctactaggtatctccaacggttgagagatacaagaagtatccaagaagttccgataggaggggtacaattcgttacttttcaacaaaggcatgcaattggaacttctaggcttagatcttattccgctgttatcatagcctcgagatacaatgcaatactcgtatacataccaccacttccttctgtaacacaagttcctggtacaggtgacaacaatactcggttcataataaaccaagtacaagctcactacaataccaatcgaaattatttcccctcctcggaaacatgagtcatttacactgtctatcaaggccaagtggcattgccaagtcaagtgcaaattatgatgagttatcttcaggcaataggccttactccaactattaaatactatatagtacccgtgaatccgctcattccgggccagggaacggttgtggtcatgagtagagcgaacgggccttcgatatatcataatgatgctctgatttaggctgaatatactcttgagacgaaatattcaagatcattgtaatgggttgctgatcggcaatcaagttcataggagttttatcaagtatttggctctttttactataactacctctgattaccaaattcaaaatatataccgtacttcctagttttttttcagcctcgtgtagcatacgataagcagtgtagccgaacatagtgaagccatatgtattctgcagctcattctttagtaaatcatccccgcaaatatcctgaaacggatagccccacttcttattccttttgtattagctagaactaaataacaattgcgcgtgacttgttacatcgaccatgtaatacgggtatttaagcgatcgggtcgccctacttttccttaaatcctactggtaacctataaaatactcaaattctcttcatcctatatggatatccggcttcttctaaaagcagaacttactaaccatactaggttctcaattccttgtagaactgcagtaaacataattaaaaaattgcgttcaacgtgtaccgataataacttccaaggattttagaatgcaatgtactctaatagtctcgatatagtggaccttcatgatataataatagaagtaattcatctgggccgagtcgaattcgtttcactacttctctctcatggcttcccgataaagccttcttttactcgagaggcaatagtattcaaggtaaagcgcgttctcgaatgttttcttgaagctgggtaggacataaatgatccagttgatattctaatacctcctgtgctttggtaagttggctccactattcgaaaagccattccaataacaagagatctgttttcatagctatgcggtaacagacgtcgagatgaccagatggtttctagaacatggtacaaacccaaatacgtcgtgcgaggtagactgcaccccattgtcctatactattcgaaatgctcgtctaagtgtcatcaaattaatgctggaccatagaggagatgtgcgaaaaggacaacttcttcagtatgccgtttgtcgggacgaggggctggaagatataatctccctgctcgtcgaaagaggcgcgcctttaaatgcgacaatgtataaggatggccagactttgatacatttctatcccataagcctagggactgcgcttcacacggcaacagaacagggaaagatgaatgcaatccgccttttgaagcatctcggagcagacactgaggtgaaggacgcgaatggcgatactactttagaataggcacaaaaatggaataaaccagatatagtaaggcttttaagagacttggaagatcattcttaagcatattcgaaattgaagataggaataaattgagactagttacagcactatgatcaattttctagtttatccatattatcatttctattcacagtcctagatagggtgcctatcgtctatatcttgaagtcatcacccattcacatactaccagcggtaggaagaccaataatgccaaacgtaatctacgcttagtcccattttgagtaatataaaacgccttacgcggctcctgcagttgtatagaaattcagtcctccaacgcgtccttatacgacgaagagtcgtggaaggtaaatgatggcgttcatataaagcttccctggatacttgtattaaaatagatggccttagaggatgttgtggatgttgtatacagcggaaggtagacaggcgcaaacaacccccctaacgaccctaatagttcagcctctctcattcgtgtccctttggtctcccagatcgagagctggccttatagcgtaatttagttgaatagtggacttgaagggatgaaatatttcgacctaggaagtgagtcgtaatcttagaccatgacattgcctctttttccttcagccgcactagcagcgcattcttgtccgatgtgtacgtactgtgtttccctaggatgaccgccgtatagggtcgagacagcatcaggctagggtcgggtacaaaagtaaagaaatataccggcttcagatcagaattagattcgaccataaggagagcactcccacgtataccttggatagcaccaggacaataacatgaaacgggagtggaagagtccgaagggtcggaaagtagcctgattgaaggtttccgtttcttcctcttttaacacggctgttctgtgtcatagaaggtagtattcccatcttggtcgttgccagtgcctcgacttgagcggagttgtcaggaccccagtactaagaaggctgatacctgaggtattgtacctgttagggtgtgtagggaactgtagactacgtaggagctatatgtgctgcctatatagcccccttcttannnnnnnnnnnnnnnnnnnnnnnnnnnnnnnnnnnnnnnnnnnnnnnnnnnnnnnnnnnnnnnnnnnnnnnnnnnnnnnnnnnnnnnnnnnnnnnnnnnnnnnnnnnnnnnnnnnnnnnnnnnnnnnnnnnnnnnnnnnnnnnnnnnnnnnnnnnnnnnnnnnnnnnnnnnnnnnnnnnnnnnnnnnnnnnnnnnnnnnnnnnnnnnnnnnnnnnnnnnnnnnnnnnnnnnnnnnnnnnnnnnnnnnnnnnnnnnnnnnnnnnnnnnnnnnnnnnnnnnnnnnnnnnnnnnnnnnnnnnnnnnnnnnnnnnnnnnnnnnnnnnnnnnnnnnnnnnnnnnnnnnnnnnnnnnnnnnnnnnnnnnnnnnnnnnnnnnnnnnnnnnnnnnnnnnnnnnnnnnnnnnnnnnnnnnnnnnnnnnnnnnnnnnnnnnnnnnnnnnnnnnnnnnnnnnnnnnnnnnnnnnnnnnnnnnnnnnnnnnnnnnnnnnnnnnnnnnnnnnnnnnnnnnnnnnnnnnnnnnnnnnnnnnnnnnnnnnnnnnnnnnnnnnnnnnnnnnnnnnnnnnnnnnnnnnnnnnnnnnnnnnnnnnnnnnnnnnnnnnnnnnnnnnnnnnnnnnnnnnnnnnnnnnnnnnnnnnnnnnnnnnnnnnnnnnnnnnnnnnnnnnnnnnnnnnnnnnnnnnnnnnnnnnnnnnnnnnnnnnnnnnnnnnnnnnnnnnnnnnnnnnnnnnnnnnnnnnnnnnnnnnnnnnnnnnnnnnnnnnnnnnnnnnnnnnnnnnnnnnnnnnnnnnnnnnnnnnnnnnnnnnnnnnnnnnnnnnnnnnnnnnnnnnnnnnnnnnnnnnnnnnnnnnnnnnnnnnnnnnnnnnnnnnnnnnnnnnnnnnnnnnnnnnnnnnnnnnnnnnnnnnnnnnnnnnnnnnnnnnnnnnnnnnnnnnnnnnnnnnnnnnnnnnnnnnnnnnnnnnnnnnnnnnnnnnnnnnnnnnnnnnnnnnnnnnnnnnnnnnnnnnnnnnnnnnnnnnnnnnnnnnnnnnnnnnnnnnnnnnnnnnnnnnnnnnnnnnnnnnnnnnnnnnnnnnnnnnnnnnnnnnnnnnnnnnnnnnnnnnnnnnnnnnnnnnnnnnnnnnnnnnnnnnnnnnnnnnnnnnnnnnnnnnnnnnnnnnnnnnnnnnnnnnnnnnnnnnnnnnnnnnnnnnnnnnnnnnnnnnnnnnnnnnnnnnnnnnnnnnnnnnnnnnnnnnnnnnnnnnnnnnnnnnnnnnnnnnnnnnnnnnnnnnnnnnnnnnnnnnnnnnnnnnnnnnnnnnnnnnnnnnnnnnnnnnnnnnnnnnnnnnnnnnnnnnnnnnnnnnnnnnnnnnnnnnnnnnnnnnnnnnnnnnnnnnnnnnnnnnnnnnnnnnnnnnnnnnnnnnnnnnnnnnnnnnnnnnnnnnnnnnnnnnnnnnnnnnnnnnnnnnnnnnnnnnnnnnnnnnnnnnnnnnnnnnnnnnnnnnnnnnnnnnnnnnnnnnnnnnnnnnnnnnnnnnnnnnnnnnnnnnnnnnnnnnnnnnnnnnnnnnnnnnnnnnnnnnnnnnnnnnnnnnnnnnnnnnnnnnnnnnnnnnnnnnnnnnnnnnnnnnnnnnnnnnnnnnnnnnnnnnnnnnnnnnnnnnnnnnnnnnnnnnnnnnnnnnnnnnnnnnnnnnnnnnnnnnnnnnnnnnnnnnnnnnnnnnnnnnnnnnnnnnnnnnnnnnnnnnnnnnnnnnnnnnnnnnnnnnnnnnnnnnnnnnnnnnnnnnnnnnnnnnnnnnnnnnnnnnnnnnnnnnnnnnnnnnnnnnnnnnnnnnnnnnnnnnnnnnnnnnnnnnnnnnnnnnnnnnnnnnnnnnnnnnnnnnnnnnnnnnnnnnnnnnnnnnnnnnnnnnnnnnnnnnnnnnnnnnnnnnnnnnnnnnnnnnnnnnnnnnnnnnnnnnnnnnnnnnnnnnnnnnnnnnnnnnnnnnnnnnnnnnnnnnnnnnnnnnnnnnnnnnnnnnnnnnnnnnnnnnnnnnnnnnnnnnnnnnnnnnnnnnnnnnnnnnnnnnnnnnnnnnnnnnnnnnnnnnnnnnnnnnnnnnnnnnnnnnnnnnnnnnnnnnnnnnnnnnnnnnnnnnnnnnnnnnnnnnnnnnnnnnnnnnnnnnnnnnnnnnnnnnnnnnnnnnnnnnnnnnnnnnnnnnnnnnnnnnnnnnnnnnnnnnnnnnnnnnnnnnnnnnnnnnnnnnnnnnnnnnnnnnnnnnnnnnnnnnnnnnnnnnnnnnnnnnnnnnnnnnnnnnnnnnnnnnnnnnnnnnnnnnnnnnnnnnnnnnnnnnnnnnnnnnnnnnnnnnnnnnnnnnnnnnnnnnnnnnnnnnnnnnnnnnnnnnnnnnnnnnnnnnnnnnnnnnnnnnnnnnnnnnnnnnnnnnnnnnnnnnnnnnnnnnnnnnnnnnnnnnnnnnnnnnnnnnnnnnnnnnnnnnnnnnnnnnnnnnnnnnnnnnnnnnnnnnnnnnnnnnnnnnnnnnnnnnnnnnnnnnnnnnnnnnnnnnnnnnnnnnnnnnnnnnnnnnnnnnnnnnnnnnnnnnnnnnnnnnnnnnnnnnnnnnnnnnnnnnnnnnnnnnnnnnnnnnnnnnnnnnnnnnnnnnnnnnnnnnnnnnnnnnnnnnnnnnnnnnnnnnnnnnnnnnnnnnnnnnnnnnnnnnnnnnnnnnnnnnnnnnnnnnnnnnnnnnnnnnnnnnnnnnnnnnnnnnnnnnnnnnnnnnnnnnnnnnnnnnnnnnnnnnnnnnnnnnnnnnnnnnnnnnnnnnnnnnnnnnnnnnnnnnnnnnnnnnnnnnnnnnnnnnnnnnnnnnnnnnnnnnnnnnnnnnnnnnnnnnnnnnnnnnnnnnnnnnnnnnnnnnnnnnnnnnnnnnnnnnnnnnnnnnnnnnnnnnnnnnnnnnnnnnnnnnnnnnnnnnnnnnnnnnnnnnnnnnnnnnnnnnnnnnnnnnnnnnnnnnnnnnnnnnnnnnnnnnnnnnnnnnnnnnnnnnnnnnnnnnnnnnnnnnnnnnnnnnnnnnnnnnnnnnnnnnnnnnnnnnnnnnnnnnnnnnnnnnnnnnnnnnnnnnnnnnnnnnnnnnnnnnnnnnnnnnnnnnnnnnnnnnnnnnnnnnnnnnnnnnnnnnnnnnnnnnnnnnnnnnnnnnnnnnnnnnnnnnnnnnnnnnnnnnnnnnnnnnnnnnnnnnnnnnnnnnnnnnnnnnnnnnnnnnnnnnnnnnnnnnnnnnnnnnnnnnnnnnnnnnnnnnnnnnnnnnnnnnnnnnnnnnnnnnnnnnnnnnnnnnnnnnnnnnnnnnnnnnnnnnnnnnnnnnnnnnnnnnnnnnnnnnnnnnnnnnnnnnnnnnnnnnnnnnnnnnnnnnnnnnnnnnnnnnnnnnnnnnnnnnnnnnnnnnnnnnnnnnnnnnnnnnnnnnnnnnnnnnnnnnnnnnnnnnnnnnnnnnnnnnnnnnnnnnnnnnnnnnnnnnnnnnnnnnnnnnnnnnnnnnnnnnnnnnnnnnnnnnnnnnnnnnnnnnnnnnnnnnnnnnnnnnnnnnnnnnnnnnnnnnnnnnnnnnnnnnnnnnnnnnnnnnnnnnnnnnnnnnnnnnnnnnnnnnnnnnnnnnnnnnnnnnnnnnnnnnnnnnnnnnnnnnnnnnnnnnnnnnnnnnnnnnnnnnnnnnnnnnnnnnnnnnnnnnnnnnnnnnnnnnnnnnnnnnnnnnnnnnnnnnnnnnnnnnnnnnnnnnnnnnnnnnnnnnnnnnnnnnnnnnnnnnnnnnnnnnnnnnnnnnnnnnnnnnnnnnnnnnnnnnnnnnnnnnnnnnnnnnnnnnnnnnnnnnnnnnnnnnnnnnnnnnnnnnnnnnnnnnnnnnnnnnnnnnnnnnnnnnnnnnnnnnnnnnnnnnnnnnnnnnnnnnnnnnnnnnnnnnnnnnnnnnnnnnnnnnnnnnnnnnnnnnnnnnnnnnnnnnnnnnnnnnnnnnnnnnnnnnnnnnnnnnnnnnnnnnnnnnnnnnnnnnnnnnnnnnnnnnnnnnnnnnnnnnnnnnnnnnnnnnnnnnnnnnnnnnnnnnnnnnnnnnnnnnnnnnnnnnnnnnnnnnnnnnnnnnnnnnnnnnnnnnnnnnnnnnnnnnnnnnnnnnnnnnnnnnnnnnnnnnnnnnnnnnnnnnnnnnnnnnnnnnnnnnnnnnnnnnnnnnnnnnnnnnnnnnnnnnnnnnnnnnnnnnnnnnnnnnnnnnnnnnnnnnnnnnnnnnnnnnnnnnnnnnnnnnnnnnnnnnnnnnnnnnnnnnnnnnnnnnnnnnnnnnnnnnnnnnnnnnnnnnnnnnnnnnnnnnnnnnnnnnnnnnnnnnnnnnnnnnnnnnnnnnnnnnnnnnnnnnnnnnnnnnnnnnnnnnnnnnnnnnnnnnnnnnnnnnnnnnnnnnnnnnnnnnnnnnnnnnnnnnnnnnnnnnnnnnnnnnnnnnnnnnnnnnnnnnnnnnnnnnnnnnnnnnnnnnnnnnnnnnnnnnnnnnnnnnnnnnnnnnnnnnnnnnnnnnnnnnnnnnnnnnnnnnnnnnnnnnnnnnnnnnnnnnnnnnnnnnnnnnnnnnnnnnnnnnnnnnnnnnnnnnnnnnnnnnnnnnnnnnnnnnnnnnnnnnnnnnnnnnnnnnnnnnnnnnnnnnnnnnnnnnnnnnnnnnnnnnnnnnnnnnnnnnnnnnnnnnnnnnnnnnnnnnnnnnnnnnnnnnnnnnnnnnnnnnnnnnnnnnnnnnnnnnnnnnnnnnnnnnnnnnnnnnnnnnnnnnnnnnnnnnnnnnnnnnnnnnnnnnnnnnnnnnnnnnnnnnnnnnnnnnnnnnnnnnnnnnnnnnnnnnnnnnnnnnnnnnnnnnnnnnnnnnnnnnnnnnnnnnnnnnnnnnnnnnnnnnnnnnnnnnnnnnnnnnnnnnnnnnnnnnnnnnnnnnnnnnnnnnnnnnnnnnnnnnnnnnnnnnnnnnnnnnnnnnnnnnnnnnnnnnnnnnnnnnnnnnnnnnnnnnnnnnnnnnnnnnnnnnnnnnnnnnnnnnnnnnnnnnnnnnnnnnnnnnnnnnnnnnnnnnnnnnnnnnnnnnnnnnnnnnnnnnnnnnnnnnnnnnnnnnnnnnnnnnnnnnnnnnnnnnnnnnnnnnnnnnnnnnnnnnnnnnnnnnnnnnnnnnnnnnnnnnnnnnnnnnnnnnnnnnnnnnnnnnnnnnnnnnnnnnnnnnnnnnnnnnnnnnnnnnnnnnnnnnnnnnnnnnnnnnnnnnnnnnnnnnnnnnnnnnnnnnnnnnnnnnnnnnnnnnnnnnnnnnnnnnnnnnnnnnnnnnnnnnnnnnnnnnnnnnnnnnnnnnnnnnnnnnnnnnnnnnnnnnnnnnnnnnnnnnnnnnnnnnnnnnnnnnnnnnnnnnnnnnnnnnnnnnnnnnnnnnnnnnnnnnnnnnnnnnnnnnnnnnnnnnnnnnnnnnnnnnnnnnnnnnnnnnnnnnnnnnnnnnnnnnnnnnnnnnnnnnnnnnnnnnnnnnnnnnnnnnnnnnnnnnnnnnnnnnnnnnnnnnnnnnnnnnnnnnnnnnnnnnnnnnnnnnnnnnnnnnnnnnnnnnnnnnnnnnnnnnnnnnnnnnnnnnnnnnnnnnnnnnnnnnnnnnnnnnnnnnnnnnnnnnnnnnnnnnnnnnnnnnnnnnnnnnnnnnnnnnnnnnnnnnnnnnnnnnnnnnnnnnnnnnnnnnnnnnnnnnnnnnnnnnnnnnnnnnnnnnnnnnnnnnnnnnnnnnnnnnnnnnnnnnnnnnnnnnnnnnnnnnnnnnnnnnnnnnnnnnnnnnnnnnnnnnnnnnnnnnnnnnnnnnnnnnnnnnnnnnnnnnnnnnnnnnnnnnnnnnnnnnnnnnnnnnnnnnnnnnnnnnnnnnnnnnnnnnnnnnnnnnnnnnnnnnnnnnnnnnnnnnnnnnnnnnnnnnnnnnnnnnnnnnnnnnnnnnnnnnnnnnnnnnnnnnnnnnnnnnnnnnnnnnnnnnnnnnnnnnnnnnnnnnnnnnnnnnnnnnnnnnnnnnnnnnnnnnnnnnnnnnnnnnnnnnnnnnnnnnnnnnnnnnnnnnnnnnnnnnnnnnnnnnnnnnnnnnnnnnnnnnnnnnnnnnnnnnnnnnnnnnnnnnnnnnnnnnnnnnnnnnnnnnnnnnnnnnnnnnnnnnnnnnnnnnnnnnnnnnnnnnnnnnnnnnnnnnnnnnnnnnnnnnnnnnnnnnnnnnnnnnnnnnnnnnnnnnnnnnnnnnnnnnnnnnnnnnnnnnnnnnnnnnnnnnnnnnnnnnnnnnnnnnnnnnnnnnnnnnnnnnnnnnnnnnnnnnnnnnnnnnnnnnnnnnnnnnnnnnnnnnnnnnnnnnnnnnnnnnnnnnnnnnnnnnnnnnnnnnnnnnnnnnnnnnnnnnnnnnnnnnnnnnnnnnnnnnnnnnnnnnnnnnnnnnnnnnnnnnnnnnnnnnnnnnnnnnnnnnnnnnnnnnnnnnnnnnnnnnnnnnnnnnnnnnnnnnnnnnnnnnnnnnnnnnnnnnnnnnnnnnnnnnnnnnnnnnnnnnnnnnnnnnnnnnnnnnnnnnnnnnnnnnnnnnnnnnnnnnnnnnnnnnnnnnnnnnnnnnnnnnnnnnnnnnnnnnnnnnnnnnnnnnnnnnnnnnnnnnnnnnnnnnnnnnnnnnnnnnnnnnnnnnnnnnnnnnnnnnnnnnnnnnnnnnnnnnnnnnnnnnnnnnnnnnnnnnnnnnnnnnnnnnnnnnnnnnnnnnnnnnnnnnnnnnnnnnnnnnnnnnnnnnnnnnnnnnnnnnnnnnnnnnnnnnnnnnnnnnnnnnnnnnnnnnnnnnnnnnnnnnnnnnnnnnnnnnnnnnnnnnnnnnnnnnnnnnnnnnnnnnnnnnnnnnnnnnnnnnnnnnnnnnnnnnnnnnnnnnnnnnnnnnnnnnnnnnnnnnnnnnnnnnnnnnnnnnnnnnnnnnnnnnnnnnnnnnnnnnnnnnnnnnnnnnnnnnnnnnnnnnnnnnnnnnnnnnnnnnnnnnnnnnnnnnnnnnnnnnnnnnnnnnnnnnnnnnnnnnnnnnnnnnnnnnnnnnnnnnnnnnnnnnnnnnnnnnnnnnnnnnnnnnnnnnnnnnnnnnnnnnnnnnnnnnnnnnnnnnnnnnnnnnnnnnnnnnnnnnnnnnnnnnnnnnnnnnnnnnnnnnnnnnnnnnnnnnnnnnnnnnnnnnnnnnnnnnnnnnnnnnnnnnnnnnnnnnnnnnnnnnnnnnnnnnnnnnnnnnnnnnnnnnnnnnnnnnnnnnnnnnnnnnnnnnnnnnnnnnnnnnnnnnnnnnnnnnnnnnnnnnnnnnnnnnnnnnnnnnnnnnnnnnnnnnnnnnnnnnnnnnnnnnnnnnnnnnnnnnnnnnnnnnnnnnnnnnnnnnnnnnnnnnnnnnnnnnnnnnnnnnnnnnnnnnnnnnnnnnnnnnnnnnnnnnnnnnnnnnnnnnnnnnnnnnnnnnnnnnnnnnnnnnnnnnnnnnnnnnnnnnnnnnnnnnnnnnnnnnnnnnnnnnnnnnnnnnnnnnnnnnnnnnnnnnnnnnnnnnnnnnnnnnnnnnnnnnnnnnnnnnnnnnnnnnnnnnnnnnnnnnnnnnnnnnnnnnnnnnnnnnnnnnnnnnnnnnnnnnnnnnnnnnnnnnnnnnnnnnnnnnnnnnnnnnnnnnnnnnnnnnnnnnnnnnnnnnnnnnnnnnnnnnnnnnnnnnnnnnnnnnnnnnnnnnnnnnnnnnnnnnnnnnnnnnnnnnnnnnnnnnnnnnnnnnnnnnnnnnnnnnnnnnnnnnnnnnnnnnnnnnnnnnnnnnnnnnnnnnnnnnnnnnnnnnnnnnnnnnnnnnnnnnnnnnnnnnnnnnnnnnnnnnnnnnnnnnnnnnnnnnnnnnnnnnnnnnnnnnnnnnnnnnnnnnnnnnnnnnnnnnnnnnnnnnnnnnnnnnnnnnnnnnnnnnnnnnnnnnnnnnnnnnnnnnnnnnnnnnnnnnnnnnnnnnnnnnnnnnnnnnnnnnnnnnnnnnnnnnnnnnnnnnnnnnnnnnnnnnnnnnnnnnnnnnnnnnnnnnnnnnnnnnnnnnnnnnnnnnnnnnnnnnnnnnnnnnnnnnnnnnnnnnnnnnnnnnnnnnnnnnnnnnnnnnnnnnnnnnnnnnnnnnnnnnnnnnnnnnnnnnnnnnnnnnnnnnnnnnnnnnnnnnnnnnnnnnnnnnnnnnnnnnnnnnnnnnnnnnnnnnnnnnnnnnnnnnnnnnnnnnnnnnnnnnnnnnnnnnnnnnnnnnnnnnnnnnnnnnnnnnnnnnnnnnnnnnnnnnnnnnnnnnnnnnnnnnnnnnnnnnnnnnnnnnnnnnnnnnnnnnnnnnnnnnnnnnnnnnnnnnnnnnnnnnnnnnnnnnnnnnnnnnnnnnnnnnnnnnnnnnnnnnnnnnnnnnnnnnnnnnnnnnnnnnnnnnnnnnnnnnnnnnnnnnnnnnnnnnnnnnnnnnnnnnnnnnnnnnnnnnnnnnnnnnnnnnnnnnnnnnnnnnnnnnnnnnnnnnnnnnnnnnnnnnnnnnnnnnnnnnnnnnnnnnnnnnnnnnnnnnnnnnnnnnnnnnnnnnnnnnnnnnnnnnnnnnnnnnnnnnnnnnnnnnnnnnnnnnnnnnnnnnnnnnnnnnnnnnnnnnnnnnnnnnnnnnnnnnnnnnnnnnnnnnnnnnnnnnnnnnnnnnnnnnnnnnnnnnnnnnnnnnnnnnnnnnnnnnnnnnnnnnnnnnnnnnnnnnnnnnnnnnnnnnnnnnnnnnnnnnnnnnnnnnnnnnnnnnnnnnnnnnnnnnnnnnnnnnnnnnnnnnnnnnnnnnnnnnnnnnnnnnnnnnnnnnnnnnnnnnnnnnnnnnnnnnnnnnnnnnnnnnnnnnnnnnnnnnnnnnnnnnnnnnnnnnnnnnnnnnnnnnnnnnnnnnnnnnnnnnnnnnnnnnnnnnnnnnnnnnnnnnnnnnnnnnnnnnnnnnnnnnnnnnnnnnnnnnnnnnnnnnnnnnnnnnnnnnnnnnnnnnnnnnnnnnnnnnnnnnnnnnnnnnnnnnnnnnnnnnnnnnnnnnnnnnnnnnnnnnnnnnnnnnnnnnnnnnnnnnnnnnnnnnnnnnnnnnnnnnnnnnnnnnnnnnnnnnnnnnnnnnnnnnnnnnnnnnnnnnnnnnnnnnnnnnnnnnnnnnnnnnnnnnnnnnnnnnnnnnnnnnnnnnnnnnnnnnnnnnnnnnnnnnnnnnnnnnnnnnnnnnnnnnnnnnnnnnnnnnnnnnnnnnnnnnnnnnnnnnnnnnnnnnnnnnnnnnnnnnnnnnnnnnnnnnnnnnnnnnnnnnnnnnnnnnnnnnnnnnnnnnnnnnnnnnnnnnnnnnnnnnnnnnnnnnnnnnnnnnnnnnnnnnnnnnnnnnnnnnnnnnnnnnnnnnnnnnnnnnnnnnnnnnnnnnnnnnnnnnnnnnnnnnnnnnnnnnnnnnnnnnnnnnnnnnnnnnnnnnnnnnnnnnnnnnnnnnnnnnnnnnnnnnnnnnnnnnnnnnnnnnnnnnnnnnnnnnnnnnnnnnnnnnnnnnnnnnnnnnnnnnnnnnnnnnnnnnnnnnnnnnnnnnnnnnnnnnnnnnnnnnnnnnnnnnnnnnnnnnnnnnnnnnnnnnnnnnnnnnnnnnnnnnnnnnnnnnnnnnnnnnnnnnnnnnnnnnnnnnnnnnnnnnnnnnnnnnnnnnnnnnnnnnnnnnnnnnnnnnnnnnnnnnnnnnnnnnnnnnnnnnnnnnnnnnnnnnnnnnnnnnnnnnnnnnnnnnnnnnnnnnnnnnnnnnnnnnnnnnnnnnnnnnnnnnnnnnnnnnnnnnnnnnnnnnnnnnnnnnnnnnnnnnnnnnnnnnnnnnnnnnnnnnnnnnnnnnnnnnnnnnnnnnnnnnnnnnnnnnnnnnnnnnnnnnnnnnnnnnnnnnnnnnnnnnnnnnnnnnnnnnnnnnnnnnnnnnnnnnnnnnnnnnnnnnnnnnnnnnnnnnnnnnnnnnnnnnnnnnnnnnnnnnnnnnnnnnnnnnnnnnnnnnnnnnnnnnnnnnnnnnnnnnnnnnnnnnnnnnnnnnnnnnnnnnnnnnnnnnnnnnnnnnnnnnnnnnnnnnnnnnnnnnnnnnnnnnnnnnnnnnnnnnnnnnnnnnnnnnnnnnnnnnnnnnnnnnnnnnnnnnnnnnnnnnnnnnnnnnnnnnnnnnnnnnnnnnnnnnnnnnnnnnnnnnnnnnnnnnnnnnnnnnnnnnnnnnnnnnnnnnnnnnnnnnnnnnnnnnnnnnnnnnnnnnnnnnnnnnnnnnnnnnnnnnnnnnnnnnnnnnnnnnnnnnnnnnnnnnnnnnnnnnnnnnnnnnnnnnnnnnnnnnnnnnnnnnnnnnnnnnnnnnnnnnnnnnnnnnnnnnnnnnnnnnnnnnnnnnnnnnnnnnnnnnnnnnnnnnnnnnnnnnnnnnnnnnnnnnnnnnnnnnnnnnnnnnnnnnnnnnnnnnnnnnnnnnnnnnnnnnnnnnnnnnnnnnnnnnnnnnnnnnnnnnnnnnnnnnnnnnnnnnnnnnnnnnnnnnnnnnnnnnnnnnnnnnnnnnnnnnnnnnnnnnnnnnnnnnnnnnnnnnnnnnnnnnnnnnnnnnnnnnnnnnnnnnnnnnnnnnnnnnnnnnnnnnnnnnnnnnnnnnnnnnnnnnnnnnnnnnnnnnnnnnnnnnnnnnnnnnnnnnnnnnnnnnnnnnnnnnnnnnnnnnnnnnnnnnnnnnnnnnnnnnnnnnnnnnnnnnnnnnnnnnnnnnnnnnnnnnnnnnnnnnnnnnnnnnnnnnnnnnnnnnnnnnnnnnnnnnnnnnnnnnnnnnnnnnnnnnnnnnnnnnnnnnnnnnnnnnnnnnnnnnnnnnnnnnnnnnnnnnnnnnnnnnnnnnnnnnnnnnnnnnnnnnnnnnnnnnnnnnnnnnnnnnnnnnnnnnnnnnnnnnnnnnnnnnnnnnnnnnnnnnnnnnnnnnnnnnnnnnnnnnnnnnnnnnnnnnnnnnnnnnnnnnnnnnnnnnnnnnnnnnnnnnnnnnnnnnnnnnnnnnnnnnnnnnnnnnnnnnnnnnnnnnnnnnnnnnnnnnnnnnnnnnnnnnnnnnnnnnnnnnnnnnnnnnnnnnnnnnnnnnnnnnnnnnnnnnnnnnnnnnnnnnnnnnnnnnnnnnnnnnnnnnnnnnnnnnnnnnnnnnnnnnnnnnnnnnnnnnnnnnnnnnnnnnnnnnnnnnnnnnnnnnnnnnnnnnnnnnnnnnnnnnnnnnnnnnnnnnnnnnnnnnnnnnnnnnnnnnnnnnnnnnnnnnnnnnnnnnnnnnnnnnnnnnnnnnnnnnnnnnnnnnnnnnnnnnnnnnnnnnnnnnnnnnnnnnnnnnnnnnnnnnnnnnnnnnnnnnnnnnnnnnnnnnnnnnnnnnnnnnnnnnnnnnnnnnnnnnnnnnnnnnnnnnnnnnnnnnnnnnnnnnnnnnnnnnnnnnnnnnnnnnnnnnnnnnnnnnnnnnnnnnnnnnnnnnnnnnnnnnnnnnnnnnnnnnnnnnnnnnnnnnnnnnnnnnnnnnnnnnnnnnnnnnnnnnnnnnnnnnnnnnnnnnnnnnnnnnnnnnnnnnnnnnnnnnnnnnnnnnnnnnnnnnnnnnnnnnnnnnnnnnnnnnnnnnnnnnnnnnnnnnnnnnnnnnnnnnnnnnnnnnnnnnnnnnnnnnnnnnnnnnnnnnnnnnnnnnnnnnnnnnnnnnnnnnnnnnnnnnnnnnnnnnnnnnnnnnnnnnnnnnnnnnnnnnnnnnnnnnnnnnnnnnnnnnnnnnnnnnnnnnnnnnnnnnnnnnnnnnnnnnnnnnnnnnnnnnnnnnnnnnnnnnnnnnnnnnnnnnnnnnnnnnnnnnnnnnnnnnnnnnnnnnnnnnnnnnnnnnnnnnnnnnnnnnnnnnnnnnnnnnnnnnnnnnnnnnnnnnnnnnnnnnnnnnnnnnnnnnnnnnnnnnnnnnnnnnnnnnnnnnnnnnnnnnnnnnnnnnnnnnnnnnnnnnnnnnnnnnnnnnnnnnnnnnnnnnnnnnnnnnnnnnnnnnnnnnnnnnnnnnnnnnnnnnnnnnnnnnnnnnnnnnnnnnnnnnnnnnnnnnnnnnnnnnnnnnnnnnnnnnnnnnnnnnnnnnnnnnnnnnnnnnnnnnnnnnnnnnnnnnnnnnnnnnnnnnnnnnnnnnnnnnnnnnnnnnnnnnnnnnnnnnnnnnnnnnnnnnnnnnnnnnnnnnnnnnnnnnnnnnnnnnnnnnnnnnnnnnnnnnnnnnnnnnnnnnnnnnnnnnnnnnnnnnnnnnnnnnnnnnnnnnnnnnnnnnnnnnnnnnnnnnnnnnnnnnnnnnnnnnnnnnnnnnnnnnnnnnnnnnnnnnnnnnnnnnnnnnnnnnnnnnnnnnnnnnnnnnnnnnnnnnnnnnnnnnnnnnnnnnnnnnnnnnnnnnnnnnnnnnnnnnnnnnnnnnnnnnnnnnnnnnnnnnnnnnnnnnnnnnnnnnnnnnnnnnnnnnnnnnnnnnnnnnnnnnnnnnnnnnnnnnnnnnnnnnnnnnnnnnnnnnnnnnnnnnnnnnnnnnnnnnnnnnnnnnnnnnnnnnnnnnnnnnnnnnnnnnnnnnnnnnnnnnnnnnnnnnnnnnnnnnnnnnnnnnnnnnnnnnnnnnnnnnnnnnnnnnnnnnnnnnnnnnnnnnnnnnnnnnnnnnnnnnnnnnnnnnnnnnnnnnnnnnnnnnnnnnnnnnnnnnnnnnnnnnnnnnnnnnnnnnnnnnnnnnnnnnnnnnnnnnnnnnnnnnnnnnnnnnnnnnnnnnnnnnnnnnnnnnnnnnnnnnnnnnnnnnnnnnnnnnnnnnnnnnnnnnnnnnnnnnnnnnnnnnnnnnnnnnnnnnnnnnnnnnnnnnnnnnnnnnnnnnnnnnnnnnnnnnnnnnnnnnnnnnnnnnnnnnnnnnnnnnnnnnnnnnnnnnnnnnnnnnnnnnnnnnnnnnnnnnnnnnnnnnnnnnnnnnnnnnnnnnnnnnnnnnnnnnnnnnnnnnnnnnnnnnnnnnnnnnnnnnnnnnnnnnnnnnnnnnnnnnnnnnnnnnnnnnnnnnnnnnnnnnnnnnnnnnnnnnnnnnnnnnnnnnnnnnnnnnnnnnnnnnnnnnnnnnnnnnnnnnnnnnnnnnnnnnnnnnnnnnnnnnnnnnnnnnnnnnnnnnnnnnnnnnnnnnnnnnnnnnnnnnnnnnnnnnnnnnnnnnnnnnnnnnnnnnnnnnnnnnnnnnnnnnnnnnnnnnnnnnnnnnnnnnnnnnnnnnnnnnnnnnnnnnnnnnnnnnnnnnnnnnnnnnnnnnnnnnnnnnnnnnnnnnnnnnnnnnnnnnnnnnnnnnnnnnnnnnnnnnnnnnnnnnnnnnnnnnnnnnnnnnnnnnnnnnnnnnnnnnnnnnnnnnnnnnnnnnnnnnnnnnnnnnnnnnnnnnnnnnnnnnnnnnnnnnnnnnnnnnnnnnnnnnnnnnnnnnnnnnnnnnnnnnnnnnnnnnnnnnnnnnnnnnnnnnnnnnnnnnnnnnnnnnnnnnnnnnnnnnnnnnnnnnnnnnnnnnnnnnnnnnnnnnnnnnnnnnnnnnnnnnnnnnnnnnnnnnnnnnnnnnnnnnnnnnnnnnnnnnnnnnnnnnnnnnnnnnnnnnnnnnnnnnnnnnnnnnnnnnnnnnnnnnnnnnnnnnnnnnnnnnnnnnnnnnnnnnnnnnnnnnnnnnnnnnnnnnnnnnnnnnnnnnnnnnnnnnnnnnnnnnnnnnnnnnnnnnnnnnnnnnnnnnnnnnnnnnnnnnnnnnnnnnnnnnnnnnnnnnnnnnnnnnnnnnnnnnnnnnnnnnnnnnnnnnnnnnnnnnnnnnnnnnnnnnnnnnnnnnnnnnnnnnnnnnnnnnnnnnnnnnnnnnnnnnnnnnnnnnnnnnnnnnnnnnnnnnnnnnnnnnnnnnnnnnnnnnnnnnnnnnnnnnnnnnnnnnnnnnnnnnnnnnnnnnnnnnnnnnnnnnnnnnnnnnnnnnnnnnnnnnnnnnnnnnnnnnnnnnnnnnnnnnnnnnnnnnnnnnnnnnnnnnnnnnnnnnnnnnnnnnnnnnnnnnnnnnnnnnnnnnnnnnnnnnnnnnnnnnnnnnnnnnnnnnnnnnnnnnnnnnnnnnnnnnnnnnnnnnnnnnnnnnnnnnnnnnnnnnnnnnnnnnnnnnnnnnnnnnnnnnnnnnnnnnnnnnnnnnnnnnnnnnnnnnnnnnnnnnnnnnnnnnnnnnnnnnnnnnnnnnnnnnnnnnnnnnnnnnnnnnnnnnnnnnnnnnnnnnnnnnnnnnnnnnnnnnnnnnnnnnnnnnnnnnnnnnnnnnnnnnnnnnnnnnnnnnnnnnnnnnnnnnnnnnnnnnnnnnnnnnnnnnnnnnnnnnnnnnnnnnnnnnnnnnnnnnnnnnnnnnnnnnnnnnnnnnnnnnnnnnnnnnnnnnnnnnnnnnnnnnnnnnnnnnnnnnnnnnnnnnnnnnnnnnnnnnnnnnnnnnnnnnnnnnnnnnnnnnnnnnnnnnnnnnnnnnnnnnnnnnnnnnnnnnnnnnnnnnnnnnnnnnnnnnnnnnnnnnnnnnnnnnnnnnnnnnnnnnnnnnnnnnnnnnnnnnnnnnnnnnnnnnnnnnnnnnnnnnnnnnnnnnnnnnnnnnnnnnnnnnnnnnnnnnnnnnnnnnnnnnnnnnnnnnnnnnnnnnnnnnnnnnnnnnnnnnnnnnnnnnnnnnnnnnnnnnnnnnnnnnnnnnnnnnnnnnnnnnnnnnnnnnnnnnnnnnnnnnnnnnnnnnnnnnnnnnnnnnnnnnnnnnnnnnnnnnnnnnnnnnnnnnnnnnnnnnnnnnnnnnnnnnnnnnnnnnnnnnnnnnnnnnnnnnnnnnnnnnnnnnnnnnnnnnnnnnnnnnnnnnnnnnnnnnnnnnnnnnnnnnnnnnnnnnnnnnnnnnnnnnnnnnnnnnnnnnnnnnnnnnnnnnnnnnnnnnnnnnnnnnnnnnnnnnnnnnnnnnnnnnnnnnnnnnnnnnnnnnnnnnnnnnnnnnnnnnnnnnnnnnnnnnnnnnnnnnnnnnnnnnnnnnnnnnnnnnnnnnnnnnnnnnnnnnnnnnnnnnnnnnnnnnnnnnnnnnnnnnnnnnnnnnnnnnnnnnnnnnnnnnnnnnnnnnnnnnnnnnnnnnnnnnnnnnnnnnnnnnnnnnnnnnnnnnnnnnnnnnnnnnnnnnnnnnnnnnnnnnnnnnnnnnnnnnnnnnnnnnnnnnnnnnnnnnnnnnnnnnnnnnnnnnnnnnnnnnnnnnnnnnnnnnnnnnnnnnnnnnnnnnnnnnnnnnnnnnnnnnnnnnnnnnnnnnnnnnnnnnnnnnnnnnnnnnnnnnnnnnnnnnnnnnnnnnnnnnnnnnnnnnnnnnnnnnnnnnnnnnnnnnnnnnnnnnnnnnnnnnnnnnnnnnnnnnnnnnnnnnnnnnnnnnnnnnnnnnnnnnnnnnnnnnnnnnnnnnnnnnnnnnnnnnnnnnnnnnnnnnnnnnnnnnnnnnnnnnnnnnnnnnnnnnnnnnnnnnnnnnnnnnnnnnnnnnnnnnnnnnnnnnnnnnnnnnnnnnnnnnnnnnnnnnnnnnnnnnnnnnnnnnnnnnnnnnnnnnnnnnnnnnnnnnnnnnnnnnnnnnnnnnnnnnnnnnnnnnnnnnnnnnnnnnnnnnnnnnnnnnnnnnnnnnnnnnnnnnnnnnnnnnnnnnnnnnnnnnnnnnnnnnnnnnnnnnnnnnnnnnnnnnnnnnnnnnnnnnnnnnnnnnnnnnnnnnnnnnnnnnnnnnnnnnnnnnnnnnnnnnnnnnnnnnnnnnnnnnnnnnnnnnnnnnnnnnnnnnnnnnnnnnnnnnnnnnnnnnnnnnnnnnnnnnnnnnnnnnnnnnnnnnnnnnnnnnnnnnnnnnnnnnnnnnnnnnnnnnnnnnnnnnnnnnnnnnnnnnnnnnnnnnnnnnnnnnnnnnnnnnnnnnnnnnnnnnnnnnnnnnnnnnnnnnnnnnnnnnnnnnnnnnnnnnnnnnnnnnnnnnnnnnnnnnnnnnnnnnnnnnnnnnnnnnnnnnnnnnnnnnnnnnnnnnnnnnnnnnnnnnnnnnnnnnnnnnnnnnnnnnnnnnnnnnnnnnnnnnnnnnnnnnnnnnnnnnnnnnnnnnnnnnnnnnnnnnnnnnnnnnnnnnnnnnnnnnnnnnnnnnnnnnnnnnnnnnnnnnnnnnnnnnnnnnnnnnnnnnnnnnnnnnnnnnnnnnnnnnnnnnnnnnnnnnnnnnnnnnnnnnnnnnnnnnnnnnnnnnnnnnnnnnnnnnnnnnnnnnnnnnnnnnnnnnnnnnnnnnnnnnnnnnnnnnnnnnnnnnnnnnnnnnnnnnnnnnnnnnnnnnnnnnnnnnnnnnnnnnnnnnnnnnnnnnnnnnnnnnnnnnnnnnnnnnnnnnnnnnnnnnnnnnnnnnnnnnnnnnnnnnnnnnnnnnnnnnnnnnnnnnnnnnnnnnnnnnnnnnnnnnnnnnnnnnnnnnnnnnnnnnnnnnnnnnnnnnnnnnnnnnnnnnnnnnnnnnnnnnnnnnnnnnnnnnnnnnnnnnnnnnnnnnnnnnnnnnnnnnnnnnnnnnnnnnnnnnnnnnnnnnnnnnnnnnnnnnnnnnnnnnnnnnnnnnnnnnnnnnnnnnnnnnnnnnnnnnnnnnnnnnnnnnnnnnnnnnnnnnnnnnnnnnnnnnnnnnnnnnnnnnnnnnnnnnnnnnnnnnnnnnnnnnnnnnnnnnnnnnnnnnnnnnnnnnnnnnnnnnnnnnnnnnnnnnnnnnnnnnnnnnnnnnnnnnnnnnnnnnnnnnnnnnnnnnnnnnnnnnnnnnnnnnnnnnnnnnnnnnnnnnnnnnnnnnnnnnnnnnnnnnnnnnnnnnnnnnnnnnnnnnnnnnnnnnnnnnnnnnnnnnnnnnnnnnnnnnnnnnnnnnnnnnnnnnnnnnnnnnnnnnnnnnnnnnnnnnnnnnnnnnnnnnnnnnnnnnnnnnnnnnnnnnnnnnnnnnnnnnnnnnnnnnnnnnnnnnnnnnnnnnnnnnnnnnnnnnnnnnnnnnnnnnnnnnnnnnnnnnnnnnnnnnnnnnnnnnnnnnnnnnnnnnnnnnnnnnnnnnnnnnnnnnnnnnnnnnnnnnnnnnnnnnnnnnnnnnnnnnnnnnnnnnnnnnnnnnnnnnnnnnnnnnnnnnnnnnnnnnnnnnnnnnnnnnnnnnnnnnnnnnnnnnnnnnnnnnnnnnnnnnnnnnnnnnnnnnnnnnnnnnnnnnnnnnnnnnnnnnnnnnnnnnnnnnnnnnnnnnnnnnnnnnnnnnnnnnnnnnnnnnnnnnnnnnnnnnnnnnnnnnnnnnnnnnnnnnnnnnnnnnnnnnnnnnnnnnnnnnnnnnnnnnnnnnnnnnnnnnnnnnnnnnnnnnnnnnnnnnnnnnnnnnnnnnnnnnnnnnnnnnnnnnnnnnnnnnnnnnnnnnnnnnnnnnnnnnnnnnnnnnnnnnnnnnnnnnnnnnnnnnnnnnnnnnnnnnnnnnnnnnnnnnnnnnnnnnnnnnnnnnnnnnnnnnnnnnnnnnnnnnnnnnnnnnnnnnnnnnnnnnnnnnnnnnnnnnnnnnnnnnnnnnnnnnnnnnnnnnnnnnnnnnnnnnnnnnnnnnnnnnnnnnnnnnnnnnnnnnnnnnnnnnnnnnnnnnnnnnnnnnnnnnnnnnnnnnnnnnnnnnnnnnnnnnnnnnnnnnnnnnnnnnnnnnnnnnnnnnnnnnnnnnnnnnnnnnnnnnnnnnnnnnnnnnnnnnnnnnnnnnnnnnnnnnnnnnnnnnnnnnnnnnnnnnnnnnnnnnnnnnnnnnnnnnnnnnnnnnnnnnnnnnnnnnnnnnnnnnnnnnnnnnnnnnnnnnnnnnnnnnnnnnnnnnnnnnnnnnnnnnnnnnnnnnnnnnnnnnnnnnnnnnnnnnnnnnnnnnnnnnnnnnnnnnnnnnnnnnnnnnnnnnnnnnnnnnnnnnnnnnnnnnnnnnnnnnnnnnnnnnnnnnnnnnnnnnnnnnnnnnnnnnnnnnnnnnnnnnnnnnnnnnnnnnnnnnnnnnnnnnnnnnnnnnnnnnnnnnnnnnnnnnnnnnnnnnnnnnnnnnnnnnnnnnnnnnnnnnnnnnnnnnnnnnnnnnnnnnnnnnnnnnnnnnnnnnnnnnnnnnnnnnnnnnnnnnnnnnnnnnnnnnnnnnnnnnnnnnnnnnnnnnnnnnnnnnnnnnnnnnnnnnnnnnnnnnnnnnnnnnnnnnnnnnnnnnnnnnnnnnnnnnnnnnnnnnnnnnnnnnnnnnnnnnnnnnnnnnnnnnnnnnnnnnnnnnnnnnnnnnnnnnnnnnnnnnnnnnnnnnnnnnnnnnnnnnnnnnnnnnnnnnnnnnnnnnnnnnnnnnnnnnnnnnnnnnnnnnnnnnnnnnnnnnnnnnnnnnnnnnnnnnnnnnnnnnnnnnnnnnnnnnnnnnnnnnnnnnnnnnnnnnnnnnnnnnnnnnnnnnnnnnnnnnnnnnnnnnnnnnnnnnnnnnnnnnnnnnnnnnnnnnnnnnnnnnnnnnnnnnnnnnnnnnnnnnnnnnnnnnnnnnnnnnnnnnnnnnnnnnnnnnnnnnnnnnnnnnnnnnnnnnnnnnnnnnnnnnnnnnnnnnnnnnnnnnnnnnnnnnnnnnnnnnnnnnnnnnnnnnnnnnnnnnnnnnnnnnnnnnnnnnnnnnnnnnnnnnnnnnnnnnnnnnnnnnnnnnnnnnnnnnnnnnnnnnnnnnnnnnnnnnnnnnnnnnnnnnnnnnnnnnnnnnnnnnnnnnnnnnnnnnnnnnnnnnnnnnnnnnnnnnnnnnnnnnnnnnnnnnnnnnnnnnnnnnnnnnnnnnnnnnnnnnnnnnnnnnnnnnnnnnnnnnnnnnnnnnnnnnnnnnnnnnnnnnnnnnnnnnnnnnnnnnnnnnnnnnnnnnnnnnnnnnnnnnnnnnnnnnnnnnnnnnnnnnnnnnnnnnnnnnnnnnnnnnnnnnnnnnnnnnnnnnnnnnnnnnnnnnnnnnnnnnnnnnnnnnnnnnnnnnnnnnnnnnnnnnnnnnnnnnnnnnnnnnnnnnnnnnnnnnnnnnnnnnnnnnnnnnnnnnnnnnnnnnnnnnnnnnnnnnnnnnnnnnnnnnnnnnnnnnnnnnnnnnnnnnnnnnnnnnnnnnnnnnnnnnnnnnnnnnnnnnnnnnnnnnnnnnnnnnnnnnnnnnnnnnnnnnnnnnnnnnnnnnnnnnnnnnnnnnnnnnnnnnnnnnnnnnnnnnnnnnnnnnnnnnnnnnnnnnnnnnnnnnnnnnnnnnnnnnnnnnnnnnnnnnnnnnnnnnnnnnnnnnnnnnnnnnnnnnnnnnnnnnnnnnnnnnnnnnnnnnnnnnnnnnnnnnnnnnnnnnnnnnnnnnnnnnnnnnnnnnnnnnnnnnnnnnnnnnnnnnnnnnnnnnnnnnnnnnnnnnnnnnnnnnnnnnnnnnnnnnnnnnnnnnnnnnnnnnnnnnnnnnnnnnnnnnnnnnnnnnnnnnnnnnnnnnnnnnnnnnnnnnnnnnnnnnnnnnnnnnnnnnnnnnnnnnnnnnnnnnnnnnnnnnnnnnnnnnnnnnnnnnnnnnnnnnnnnnnnnnnnnnnnnnnnnnnnnnnnnnnnnnnnnnnnnnnnnnnnnnnnnnnnnnnnnnnnnnnnnnnnnnnnnnnnnnnnnnnnnnnnnnnnnnnnnnnnnnnnnnnnnnnnnnnnnnnnnnnnnnnnnnnnnnnnnnnnnnnnnnnnnnnnnnnnnnnnnnnnnnnnnnnnnnnnnnnnnnnnnnnnnnnnnnnnnnnnnnnnnnnnnnnnnnnnnnnnnnnnnnnnnnnnnnnnnnnnnnnnnnnnnnnnnnnnnnnnnnnnnnnnnnnnnnnnnnnnnnnnnnnnnnnnnnnnnnnnnnnnnnnnnnnnnnnnnnnnnnnnnnnnnnnnnnnnnnnnnnnnnnnnnnnnnnnnnnnnnnnnnnnnnnnnnnnnnnnnnnnnnnnnnnnnnnnnnnnnnnnnnnnnnnnnnnnnnnnnnnnnnnnnnnnnnnnnnnnnnnnnnnnnnnnnnnnnnnnnnnnnnnnnnnnnnnnnnnnnnnnnnnnnnnnnnnnnnnnnnnnnnnnnnnnnnnnnnnnnnnnnnnnnnnnnnnnnnnnnnnnnnnnnnnnnnnnnnnnnnnnnnnnnnnnnnnnnnnnnnnnnnnnnnnnnnnnnnnnnnnnnnnnnnnnnnnnnnnnnnnnnnnnnnnnnnnnnnnnnnnnnnnnnnnnnnnnnnnnnnnnnnnnnnnnnnnnnnnnnnnnnnnnnnnnnnnnnnnnnnnnnnnnnnnnnnnnnnnnnnnnnnnnnnnnnnnnnnnnnnnnnnnnnnnnnnnnnnnnnnnnnnnnnnnnnnnnnnnnnnnnnnnnnnnnnnnnnnnnnnnnnnnnnnnnnnnnnnnnnnnnnnnnnnnnnnnnnnnnnnnnnnnnnnnnnnnnnnnnnnnnnnnnnnnnnnnnnnnnnnnnnnnnnnnnnnnnnnnnnnnnnnnnnnnnnnnnnnnnnnnnnnnnnnnnnnnnnnnnnnnnnnnnnnnnnnnnnnnnnnnnnnnnnnnnnnnnnnnnnnnnnnnnnnnnnnnnnnnnnnnnnnnnnnnnnnnnnnnnnnnnnnnnnnnnnnnnnnnnnnnnnnnnnnnnnnnnnnnnnnnnnnnnnnnnnnnnnnnnnnnnnnnnnnnnnnnnnnnnnnnnnnnnnnnnnnnnnnnnnnnnnnnnnnnnnnnnnnnnnnnnnnnnnnnnnnnnnnnnnnnnnnnnnnnnnnnnnnnnnnnnnnnnnnnnnnnnnnnnnnnnnnnnnnnnnnnnnnnnnnnnnnnnnnnnnnnnnnnnnnnnnnnnnnnnnnnnnnnnnnnnnnnnnnnnnnnnnnnnnnnnnnnnnnnnnnnnnnnnnnnnnnnnnnnnnnnnnnnnnnnnnnnnnnnnnnnnnnnnnnnnnnnnnnnnnnnnnnnnnnnnnnnnnnnnnnnnnnnnnnnnnnnnnnnnnnnnnnnnnnnnnnnnnnnnnnnnnnnnnnnnnnnnnnnnnnnnnnnnnnnnnnnnnnnnnnnnnnnnnnnnnnnnnnnnnnnnnnnnnnnnnnnnnnnnnnnnnnnnnnnnnnnnnnnnnnnnnnnnnnnnnnnnnnnnnnnnnnnnnnnnnnnnnnnnnnnnnnnnnnnnnnnnnnnnnnnnnnnnnnnnnnnnnnnnnnnnnnnnnnnnnnnnnnnnnnnnnnnnnnnnnnnnnnnnnnnnnnnnnnnnnnnnnnnnnnnnnnnnnnnnnnnnnnnnnnnnnnnnnnnnnnnnnnnnnnnnnnnnnnnnnnnnnnnnnnnnnnnnnnnnnnnnnnnnnnnnnnnnnnnnnnnnnnnnnnnnnnnnnnnnnnnnnnnnnnnnnnnnnnnnnnnnnnnnnnnnnnnnnnnnnnnnnnnnnnnnnnnnnnnnnnnnnnnnnnnnnnnnnnnnnnnnnnnnnnnnnnnnnnnnnnnnnnnnnnnnnnnnnnnnnnnnnnnnnnnnnnnnnnnnnnnnnnnnnnnnnnnnnnnnnnnnnnnnnnnnnnnnnnnnnnnnnnnnnnnnnnnnnnnnnnnnnnnnnnnnnnnnnnnnnnnnnnnnnnnnnnnnnnnnnnnnnnnnnnnnnnnnnnnnnnnnnnnnnnnnnnnnnnnnnnnnnnnnnnnnnnnnnnnnnnnnnnnnnnnnnnnnnnnnnnnnnnnnnnnnnnnnnnnnnnnnnnnnnnnnnnnnnnnnnnnnnnnnnnnnnnnnnnnnnnnnnnnnnnnnnnnnnnnnnnnnnnnnnnnnnnnnnnnnnnnnnnnnnnnnnnnnnnnnnnnnnnnnnnnnnnnnnnnnnnnnnnnnnnnnnnnnnnnnnnnnnnnnnnnnnnnnnnnnnnnnnnnnnnnnnnnnnnnnnnnnnnnnnnnnnnnnnnnnnnnnnnnnnnnnnnnnnnnnnnnnnnnnnnnnnnnnnnnnnnnnnnnnnnnnnnnnnnnnnnnnnnnnnnnnnnnnnnnnnnnnnnnnnnnnnnnnnnnnnnnnnnnnnnnnnnnnnnnnnnnnnnnnnnnnnnnnnnnnnnnnnnnnnnnnnnnnnnnnnnnnnnnnnnnnnnnnnnnnnnnnnnnnnnnnnnnnnnnnnnnnnnnnnnnnnnnnnnnnnnnnnnnnnnnnnnnnnnnnnnnnnnnnnnnnnnnnnnnnnnnnnnnnnnnnnnnnnnnnnnnnnnnnnnnnnnnnnnnnnnnnnnnnnnnnnnnnnnnnnnnnnnnnnnnnnnnnnnnnnnnnnnnnnnnnnnnnnnnnnnnnnnnnnnnnnnnnnnnnnnnnnnnnnnnnnnnnnnnnnnnnnnnnnnnnnnnnnnnnnnnnnnnnnnnnnnnnnnnnnnnnnnnnnnnnnnnnnnnnnnnnnnnnnnnnnnnnnnnnnnnnnnnnnnnnnnnnnnnnnnnnnnnnnnnnnnnnnnnnnnnnnnnnnnnnnnnnnnnnnnnnnnnnnnnnnnnnnnnnnnnnnnnnnnnnnnnnnnnnnnnnnnnnnnnnnnnnnnnnnnnnnnnnnnnnnnnnnnnnnnnnnnnnnnnnnnnnnnnnnnnnnnnnnnnnnnnnnnnnnnnnnnnnnnnnnnnnnnnnnnnnnnnnnnnnnnnnnnnnnnnnnnnnnnnnnnnnnnnnnnnnnnnnnnnnnnnnnnnnnnnnnnnnnnnnnnnnnnnnnnnnnnnnnnnnnnnnnnnnnnnnnnnnnnnnnnnnnnnnnnnnnnnnnnnnnnnnnnnnnnnnnnnnnnnnnnnnnnnnnnnnnnnnnnnnnnnnnnnnnnnnnnnnnnnnnnnnnnnnnnnnnnnnnnnnnnnnnnnnnnnnnnnnnnnnnnnnnnnnnnnnnnnnnnnnnnnnnnnnnnnnnnnnnnnnnnnnnnnnnnnnnnnnnnnnnnnnnnnnnnnnnnnnnnnnnnnnnnnnnnnnnnnnnnnnnnnnnnnnnnnnnnnnnnnnnnnnnnnnnnnnnnnnnnnnnnnnnnnnnnnnnnnnnnnnnnnnnnnnnnnnnnnnnnnnnnnnnnnnnnnnnnnnnnnnnnnnnnnnnnnnnnnnnnnnnnnnnnnnnnnnnnnnnnnnnnnnnnnnnnnnnnnnnnnnnnnnnnnnnnnnnnnnnnnnnnnnnnnnnnnnnnnnnnnnnnnnnnnnnnnnnnnnnnnnnnnnnnnnnnnnnnnnnnnnnnnnnnnnnnnnnnnnnnnnnnnnnnnnnnnnnnnnnnnnnnnnnnnnnnnnnnnnnnnnnnnnnnnnnnnnnnnnnnnnnnnnnnnnnnnnnnnnnnnnnnnnnnnnnnnnnnnnnnnnnnnnnnnnnnnnnnnnnnnnnnnnnnnnnnnnnnnnnnnnnnnnnnnnnnnnnnnnnnnnnnnnnnnnnnnnnnnnnnnnnnnnnnnnnnnnnnnnnnnnnnnnnnnnnnnnnnnnnnnnnnnnnnnnnnnnnnnnnnnnnnnnnnnnnnnnnnnnnnnnnnnnnnnnnnnnnnnnnnnnnnnnnnnnnnnnnnnnnnnnnnnnnnnnnnnnnnnnnnnnnnnnnnnnnnnnnnnnnnnnnnnnnnnnnnnnnnnnnnnnnnnnnnnnnnnnnnnnnnnnnnnnnnnnnnnnnnnnnnnnnnnnnnnnnnnnnnnnnnnnnnnnnnnnnnnnnnnnnnnnnnnnnnnnnnnnnnnnnnnnnnnnnnnnnnnnnnnnnnnnnnnnnnnnnnnnnnnnnnnnnnnnnnnnnnnnnnnnnnnnnnnnnnnnnnnnnnnnnnnnnnnnnnnnnnnnnnnnnnnnnnnnnnnnnnnnnnnnnnnnnnnnnnnnnnnnnnnnnnnnnnnnnnnnnnnnnnnnnnnnnnnnnnnnnnnnnnnnnnnnnnnnnnnnnnnnnnnnnnnnnnnnnnnnnnnnnnnnnnnnnnnnnnnnnnnnnnnnnnnnnnnnnnnnnnnnnnnnnnnnnnnnnnnnnnnnnnnnnnnnnnnnnnnnnnnnnnnnnnnnnnnnnnnnnnnnnnnnnnnnnnnnnnnnnnnnnnnnnnnnnnnnnnnnnnnnnnnnnnnnnnnnnnnnnnnnnnnnnnnnnnnnnnnnnnnnnnnnnnnnnnnnnnnnnnnnnnnnnnnnnnnnnnnnnnnnnnnnnnnnnnnnnnnnnnnnnnnnnnnnnnnnnnnnnnnnnnnnnnnnnnnnnnnnnnnnnnnnnnnnnnnnnnnnnnnnnnnnnnnnnnnnnnnnnnnnnnnnnnnnnnnnnnnnnnnnnnnnnnnnnnnnnnnnnnnnnnnnnnnnnnnnnnnnnnnnnnnnnnnnnnnnnnnnnnnnnnnnnnnnnnnnnnnnnnnnnnnnnnnnnnnnnnnnnnnnnnnnnnnnnnnnnnnnnnnnnnnnnnnnnnnnnnnnnnnnnnnnnnnnnnnnnnnnnnnnnnnnnnnnnnnnnnnnnnnnnnnnnnnnnnnnnnnnnnnnnnnnnnnnnnnnnnnnnnnnnnnnnnnnnnnnnnnnnnnnnnnnnnnnnnnnnnnnnnnnnnnnnnnnnnnnnnnnnnnnnnnnnnnnnnnnnnnnnnnnnnnnnnnnnnnnnnnnnnnnnnnnnnnnnnnnnnnnnnnnnnnnnnnnnnnnnnnnnnnnnnnnnnnnnnnnnnnnnnnnnnnnnnnnnnnnnnnnnnnnnnnnnnnnnnnnnnnnnnnnnnnnnnnnnnnnnnnnnnnnnnnnnnnnnnnnnnnnnnnnnnnnnnnnnnnnnnnnnnnnnnnnnnnnnnnnnnnnnnnnnnnnnnnnnnnnnnnnnnnnnnnnnnnnnnnnnnnnnnnnnnnnnnnnnnnnnnnnnnnnnnnnnnnnnnnnnnnnnnnnnnnnnnnnnnnnnnnnnnnnnnnnnnnnnnnnnnnnnnnnnnnnnnnnnnnnnnnnnnnnnnnnnnnnnnnnnnnnnnnnnnnnnnnnnnnnnnnnnnnnnnnnnnnnnnnnnnnnnnnnnnnnnnnnnnnnnnnnnnnnnnnnnnnnnnnnnnnnnnnnnnnnnnnnnnnnnnnnnnnnnnnnnnnnnnnnnnnnnnnnnnnnnnnnnnnnnnnnnnnnnnnnnnnnnnnnnnnnnnnnnnnnnnnnnnnnnnnnnnnnnnnnnnnnnnnnnnnnnnnnnnnnnnnnnnnnnnnnnnnnnnnnnnnnnnnnnnnnnnnnnnnnnnnnnnnnnnnnnnnnnnnnnnnnnnnnnnnnnnnnnnnnnnnnnnnnnnnnnnnnnnnnnnnnnnnnnnnnnnnnnnnnnnnnnnnnnnnnnnnnnnnnnnnnnnnnnnnnnnnnnnnnnnnnnnnnnnnnnnnnnnnnnnnnnnnnnnnnnnnnnnnnnnnnnnnnnnnnnnnnnnnnnnnnnnnnnnnnnnnnnnnnnnnnnnnnnnnnnnnnnnnnnnnnnnnnnnnnnnnnnnnnnnnnnnnnnnnnnnnnnnnnnnnnnnnnnnnnnnnnnnnnnnnnnnnnnnnnnnnnnnnnnnnnnnnnnnnnnnnnnnnnnnnnnnnnnnnnnnnnnnnnnnnnnnnnnnnnnnnnnnnnnnnnnnnnnnnnnnnnnnnnnnnnnnnnnnnnnnnnnnnnnnnnnnnnnnnnnnnnnnnnnnnnnnnnnnnnnnnnnnnnnnnnnnnnnnnnnnnnnnnnnnnnnnnnnnnnnnnnnnnnnnnnnnnnnnnnnnnnnnnnnnnnnnnnnnnnnnnnnnnnnnnnnnnnnnnnnnnnnnnnnnnnnnnnnnnnnnnnnnnnnnnnnnnnnnnnnnnnnnnnnnnnnnnnnnnnnnnnnnnnnnnnnnnnnnnnnnnnnnnnnnnnnnnnnnnnnnnnnnnnnnnnnnnnnnnnnnnnnnnnnnnnnnnnnnnnnnnnnnnnnnnnnnnnnnnnnnnnnnnnnnnnnnnnnnnnnnnnnnnnnnnnnnnnnnnnnnnnnnnnnnnnnnnnnnnnnnnnnnnnnnnnnnnnnnnnnnnnnnnnnnnnnnnnnnnnnnnnnnnnnnnnnnnnnnnnnnnnnnnnnnnnnnnnnnnnnnnnnnnnnnnnnnnnnnnnnnnnnnnnnnnnnnnnnnnnnnnnnnnnnnnnnnnnnnnnnnnnnnnnnnnnnnnnnnnnnnnnnnnnnnnnnnnnnnnnnnnnnnnnnnnnnnnnnnnnnnnnnnnnnnnnnnnnnnnnnnnnnnnnnnnnnnnnnnnnnnnnnnnnnnnnnnnnnnnnnnnnnnnnnnnnnnnnnnnnnnnnnnnnnnnnnnnnnnnnnnnnnnnnnnnnnnnnnnnnnnnnnnnnnnnnnnnnnnnnnnnnnnnnnnnnnnnnnnnnnnnnnnnnnnnnnnnnnnnnnnnnnnnnnnnnnnnnnnnnnnnnnnnnnnnnnnnnnnnnnnnnnnnnnnnnnnnnnnnnnnnnnnnnnnnnnnnnnnnnnnnnnnnnnnnnnnnnnnnnnnnnnnnnnnnnnnnnnnnnnnnnnnnnnnnnnnnnnnnnnnnnnnnnnnnnnnnnnnnnnnnnnnnnnnnnnnnnnnnnnnnnnnnnnnnnnnnnnnnnnnnnnnnnnnnnnnnnnnnnnnnnnnnnnnnnnnnnnnnnnnnnnnnnnnnnnnnnnnnnnnnnnnnnnnnnnnnnnnnnnnnnnnnnnnnnnnnnnnnnnnnnnnnnnnnnnnnnnnnnnnnnnnnnnnnnnnnnnnnnnnnnnnnnnnnnnnnnnnnnnnnnnnnnnnnnnnnnnnnnnnnnnnnnnnnnnnnnnnnnnnnnnnnnnnnnnnnnnnnnnnnnnnnnnnnnnnnnnnnnnnnnnnnnnnnnnnnnnnnnnnnnnnnnnnnnnnnnnnnnnnnnnnnnnnnnnnnnnnnnnnnnnnnnnnnnnnnnnnnnnnnnnnnnnnnnnnnnnnnnnnnnnnnnnnnnnnnnnnnnnnnnnnnnnnnnnnnnnnnnnnnnnnnnnnnnnnnnnnnnnnnnnnnnnnnnnnnnnnnnnnnnnnnnnnnnnnnnnnnnnnnnnnnnnnnnnnnnnnnnnnnnnnnnnnnnnnnnnnnnnnnnnnnnnnnnnnnnnnnnnnnnnnnnnnnnnnnnnnnnnnnnnnnnnnnnnnnnnnnnnnnnnnnnnnnnnnnnnnnnnnnnnnnnnnnnnnnnnnnnnnnnnnnnnnnnnnnnnnnnnnnnnnnnnnnnnnnnnnnnnnnnnnnnnnnnnnnnnnnnnnnnnnnnnnnnnnnnnnnnnnnnnnnnnnnnnnnnnnnnnnnnnnnnnnnnnnnnnnnnnnnnnnnnnnnnnnnnnnnnnnnnnnnnnnnnnnnnnnnnnnnnnnnnnnnnnnnnnnnnnnnnnnnnnnnnnnnnnnnnnnnnnnnnnnnnnnnnnnnnnnnnnnnnnnnnnnnnnnnnnnnnnnnnnnnnnnnnnnnnnnnnnnnnnnnnnnnnnnnnnnnnnnnnnnnnnnnnnnnnnnnnnnnnnnnnnnnnnnnnnnnnnnnnnnnnnnnnnnnnnnnnnnnnnnnnnnnnnnnnnnnnnnnnnnnnnnnnnnnnnnnnnnnnnnnnnnnnnnnnnnnnnnnnnnnnnnnnnnnnnnnnnnnnnnnnnnnnnnnnnnnnnnnnnnnnnnnnnnnnnnnnnnnnnnnnnnnnnnnnnnnnnnnnnnnnnnnnnnnnnnnnnnnnnnnnnnnnnnnnnnnnnnnnnnnnnnnnnnnnnnnnnnnnnnnnnnnnnnnnnnnnnnnnnnnnnnnnnnnnnnnnnnnnnnnnnnnnnnnnnnnnnnnnnnnnnnnnnnnnnnnnnnnnnnnnnnnnnnnnnnnnnnnnnnnnnnnnnnnnnnnnnnnnnnnnnnnnnnnnnnnnnnnnnnnnnnnnnnnnnnnnnnnnnnnnnnnnnnnnnnnnnnnnnnnnnnnnnnnnnnnnnnnnnnnnnnnnnnnnnnnnnnnnnnnnnnnnnnnnnnnnnnnnnnnnnnnnnnnnnnnnnnnnnnnnnnnnnnnnnnnnnnnnnnnnnnnnnnnnnnnnnnnnnnnnnnnnnnnnnnnnnnnnnnnnnnnnnnnnnnnnnnnnnnnnnnnnnnnnnnnnnnnnnnnnnnnnnnnnnnnnnnnnnnnnnnnnnnnnnnnnnnnnnnnnnnnnnnnnnnnnnnnnnnnnnnnnnnnnnnnnnnnnnnnnnnnnnnnnnnnnnnnnnnnnnnnnnnnnnnnnnnnnnnnnnnnnnnnnnnnnnnnnnnnnnnnnnnnnnnnnnnnnnnnnnnnnnnnnnnnnnnnnnnnnnnnnnnnnnnnnnnnnnnnnnnnnnnnnnnnnnnnnnnnnnnnnnnnnnnnnnnnnnnnnnnnnnnnnnnnnnnnnnnnnnnnnnnnnnnnnnnnnnnnnnnnnnnnnnnnnnnnnnnnnnnnnnnnnnnnnnnnnnnnnnnnnnnnnnnnnnnnnnnnnnnnnnnnnnnnnnnnnnnnnnnnnnnnnnnnnnnnnnnnnnnnnnnnnnnnnnnnnnnnnnnnnnnnnnnnnnnnnnnnnnnnnnnnnnnnnnnnnnnnnnnnnnnnnnnnnnnnnnnnnnnnnnnnnnnnnnnnnnnnnnnnnnnnnnnnnnnnnnnnnnnnnnnnnnnnnnnnnnnnnnnnnnnnnnnnnnnnnnnnnnnnnnnnnnnnnnnnnnnnnnnnnnnnnnnnnnnnnnnnnnnnnnnnnnnnnnnnnnnnnnnnnnnnnnnnnnnnnnnnnnnnnnnnnnnnnnnnnnnnnnnnnnnnnnnnnnnnnnnnnnnnnnnnnnnnnnnnnnnnnnnnnnnnnnnnnnnnnnnnnnnnnnnnnnnnnnnnnnnnnnnnnnnnnnnnnnnnnnnnnnnnnnnnnnnnnnnnnnnnnnnnnnnnnnnnnnnnnnnnnnnnnnnnnnnnnnnnnnnnnnnnnnnnnnnnnnnnnnnnnnnnnnnnnnnnnnnnnnnnnnnnnnnnnnnnnnnnnnnnnnnnnnnnnnnnnnnnnnnnnnnnnnnnnnnnnnnnnnnnnnnnnnnnnnnnnnnnnnnnnnnnnnnnnnnnnnnnnnnnnnnnnnnnnnnnnnnnnnnnnnnnnnnnnnnnnnnnnnnnnnnnnnnnnnnnnnnnnnnnnnnnnnnnnnnnnnnnnnnnnnnnnnnnnnnnnnnnnnnnnnnnnnnnnnnnnnnnnnnnnnnnnnnnnnnnnnnnnnnnnnnnnnnnnnnnnnnnnnnnnnnnnnnnnnnnnnnnnnnnnnnnnnnnnnnnnnnnnnnnnnnnnnnnnnnnnnnnnnnnnnnnnnnnnnnnnnnnnnnnnnnnnnnnnnnnnnnnnnnnnnnnnnnnnnnnnnnnnnnnnnnnnnnnnnnnnnnnnnnnnnnnnnnnnnnnnnnnnnnnnnnnnnnnnnnnnnnnnnnnnnnnnnnnnnnnnnnnnnnnnnnnnnnnnnnnnnnnnnnnnnnnnnnnnnnnnnnnnnnnnnnnnnnnnnnnnnnnnnnnnnnnnnnnnnnnnnnnnnnnnnnnnnnnnnnnnnnnnnnnnnnnnnnnnnnnnnnnnnnnnnnnnnnnnnnnnnnnnnnnnnnnnnnnnnnnnnnnnnnnnnnnnnnnnnnnnnnnnnnnnnnnnnnnnnnnnnnnnnnnnnnnnnnnnnnnnnnnnnnnnnnnnnnnnnnnnnnnnnnnnnnnnnnnnnnnnnnnnnnnnnnnnnnnnnnnnnnnnnnnnnnnnnnnnnnnnnnnnnnnnnnnnnnnnnnnnnnnnnnnnnnnnnnnnnnnnnnnnnnnnnnnnnnnnnnnnnnnnnnnnnnnnnnnnnnnnnnnnnnnnnnnnnnnnnnnnnnnnnnnnnnnnnnnnnnnnnnnnnnnnnnnnnnnnnnnnnnnnnnnnnnnnnnnnnnnnnnnnnnnnnnnnnnnnnnnnnnnnnnnnnnnnnnnnnnnnnnnnnnnnnnnnnnnnnnnnnnnnnnnnnnnnnnnnnnnnnnnnnnnnnnnnnnnnnnnnnnnnnnnnnnnnnnnnnnnnnnnnnnnnnnnnnnnnnnnnnnnnnnnnnnnnnnnnnnnnnnnnnnnnnnnnnnnnnnnnnnnnnnnnnnnnnnnnnnnnnnnnnnnnnnnnnnnnnnnnnnnnnnnnnnnnnnnnnnnnnnnnnnnnnnnnnnnnnnnnnnnnnnnnnnnnnnnnnnnnnnnnnnnnnnnnnnnnnnnnnnnnnnnnnnnnnnnnnnnnnnnnnnnnnnnnnnnnnnnnnnnnnnnnnnnnnnnnnnnnnnnnnnnnnnnnnnnnnnnnnnnnnnnnnnnnnnnnnnnnnnnnnnnnnnnnnnnnnnnnnnnnnnnnnnnnnnnnnnnnnnnnnnnnnnnnnnnnnnnnnnnnnnnnnnnnnnnnnnnnnnnnnnnnnnnnnnnnnnnnnnnnnnnnnnnnnnnnnnnnnnnnnnnnnnnnnnnnnnnnnnnnnnnnnnnnnnnnnnnnnnnnnnnnnnnnnnnnnnnnnnnnnnnnnnnnnnnnnnnnnnnnnnnnnnnnnnnnnnnnnnnnnnnnnnnnnnnnnnnnnnnnnnnnnnnnnnnnnnnnnnnnnnnnnnnnnnnnnnnnnnnnnnnnnnnnnnnnnnnnnnnnnnnnnnnnnnnnnnnnnnnnnnnnnnnnnnnnnnnnnnnnnnnnnnnnnnnnnnnnnnnnnnnnnnnnnnnnnnnnnnnnnnnnnnnnnnnnnnnnnnnnnnnnnnnnnnnnnnnnnnnnnnnnnnnnnnnnnnnnnnnnnnnnnnnnnnnnnnnnnnnnnnnnnnnnnnnnnnnnnnnnnnnnnnnnnnnnnnnnnnnnnnnnnnnnnnnnnnnnnnnnnnnnnnnnnnnnnnnnnnnnnnnnnnnnnnnnnnnnnnnnnnnnnnnnnnnnnnnnnnnnnnnnnnnnnnnnnnnnnnnnnnnnnnnnnnnnnnnnnnnnnnnnnnnnnnnnnnnnnnnnnnnnnnnnnnnnnnnnnnnnnnnnnnnnnnnnnnnnnnnnnnnnnnnnnnnnnnnnnnnnnnnnnnnnnnnnnnnnnnnnnnnnnnnnnnnnnnnnnnnnnnnnnnnnnnnnnnnnnnnnnnnnnnnnnnnnnnnnnnnnnnnnnnnnnnnnnnnnnnnnnnnnnnnnnnnnnnnnnnnnnnnnnnnnnnnnnnnnnnnnnnnnnnnnnnnnnnnnnnnnnnnnnnnnnnnnnnnnnnnnnnnnnnnnnnnnnnnnnnnnnnnnnnnnnnnnnnnnnnnnnnnnnnnnnnnnnnnnnnnnnnnnnnnnnnnnnnnnnnnnnnnnnnnnnnnnnnnnnnnnnnnnnnnnnnnnnnnnnnnnnnnnnnnnnnnnnnnnnnnnnnnnnnnnnnnnnnnnnnnnnnnnnnnnnnnnnnnnnnnnnnnnnnnnnnnnnnnnnnnnnnnnnnnnnnnnnnnnnnnnnnnnnnnnnnnnnnnnnnnnnnnnnnnnnnnnnnnnnnnnnnnnnnnnnnnnnnnnnnnnnnnnnnnnnnnnnnnnnnnnnnnnnnnnnnnnnnnnnnnnnnnnnnnnnnnnnnnnnnnnnnnnnnnnnnnnnnnnnnnnnnnnnnnnnnnnnnnnnnnnnnnnnnnnnnnnnnnnnnnnnnnnnnnnnnnnnnnnnnnnnnnnnnnnnnnnnnnnnnnnnnnnnnnnnnnnnnnnnnnnnnnnnnnnnnnnnnnnnnnnnnnnnnnnnnnnnnnnnnnnnnnnnnnnnnnnnnnnnnnnnnnnnnnnnnnnnnnnnnnnnnnnnnnnnnnnnnnnnnnnnnnnnnnnnnnnnnnnnnnnnnnnnnnnnnnnnnnnnnnnnnnnnnnnnnnnnnnnnnnnnnnnnnnnnnnnnnnnnnnnnnnnnnnnnnnnnnnnnnnnnnnnnnnnnnnnnnnnnnnnnnnnnnnnnnnnnnnnnnnnnnnnnnnnnnnnnnnnnnnnnnnnnnnnnnnnnnnnnnnnnnnnnnnnnnnnnnnnnnnnnnnnnnnnnnnnnnnnnnnnnnnnnnnnnnnnnnnnnnnnnnnnnnnnnnnnnnnnnnnnnnnnnnnnnnnnnnnnnnnnnnnnnnnnnnnnnnnnnnnnnnnnnnnnnnnnnnnnnnnnnnnnnnnnnnnnnnnnnnnnnnnnnnnnnnnnnnnnnnnnnnnnnnnnnnnnnnnnnnnnnnnnnnnnnnnnnnnnnnnnnnnnnnnnnnnnnnnnnnnnnnnnnnnnnnnnnnnnnnnnnnnnnnnnnnnnnnnnnnnnnnnnnnnnnnnnnnnnnnnnnnnnnnnnnnnnnnnnnnnnnnnnnnnnnnnnnnnnnnnnnnnnnnnnnnnnnnnnnnnnnnnnnnnnnnnnnnnnnnnnnnnnnnnnnnnnnnnnnnnnnnnnnnnnnnnnnnnnnnnnnnnnnnnnnnnnnnnnnnnnnnnnnnnnnnnnnnnnnnnnnnnnnnnnnnnnnnnnnnnnnnnnnnnnnnnnnnnnnnnnnnnnnnnnnnnnnnnnnnnnnnnnnnnnnnnnnnnnnnnnnnnnnnnnnnnnnnnnnnnnnnnnnnnnnnnnnnnnnnnnnnnnnnnnnnnnnnnnnnnnnnnnnnnnnnnnnnnnnnnnnnnnnnnnnnnnnnnnnnnnnnnnnnnnnnnnnnnnnnnnnnnnnnnnnnnnnnnnnnnnnnnnnnnnnnnnnnnnnnnnnnnnnnnnnnnnnnnnnnnnnnnnnnnnnnnnnnnnnnnnnnnnnnnnnnnnnnnnnnnnnnnnnnnnnnnnnnnnnnnnnnnnnnnnnnnnnnnnnnnnnnnnnnnnnnnnnnnnnnnnnnnnnnnnnnnnnnnnnnnnnnnnnnnnnnnnnnnnnnnnnnnnnnnnnnnnnnnnnnnnnnnnnnnnnnnnnnnnnnnnnnnnnnnnnnnnnnnnnnnnnnnnnnnnnnnnnnnnnnnnnnnnnnnnnnnnnnnnnnnnnnnnnnnnnnnnnnnnnnnnnnnnnnnnnnnnnnnnnnnnnnnnnnnnnnnnnnnnnnnnnnnnnnnnnnnnnnnnnnnnnnnnnnnnnnnnnnnnnnnnnnnnnnnnnnnnnnnnnnnnnnnnnnnnnnnnnnnnnnnnnnnnnnnnnnnnnnnnnnnnnnnnnnnnnnnnnnnnnnnnnnnnnnnnnnnnnnnnnnnnnnnnnnnnnnnnnnnnnnnnnnnnnnnnnnnnnnnnnnnnnnnnnnnnnnnnnnnnnnnnnnnnnnnnnnnnnnnnnnnnnnnnnnnnnnnnnnnnnnnnnnnnnnnnnnnnnnnnnnnnnnnnnnnnnnnnnnnnnnnnnnnnnnnnnnnnnnnnnnnnnnnnnnnnnnnnnnnnnnnnnnnnnnnnnnnnnnnnnnnnnnnnnnnnnnnnnnnnnnnnnnnnnnnnnnnnnnnnnnnnnnnnnnnnnnnnnnnnnnnnnnnnnnnnnnnnnnnnnnnnnnnnnnnnnnnnnnnnnnnnnnnnnnnnnnnnnnnnnnnnnnnnnnnnnnnnnnnnnnnnnnnnnnnnnnnnnnnnnnnnnnnnnnnnnnnnnnnnnnnnnnnnnnnnnnnnnnnnnnnnnnnnnnnnnnnnnnnnnnnnnnnnnnnnnnnnnnnnnnnnnnnnnnnnnnnnnnnnnnnnnnnnnnnnnnnnnnnnnnnnnnnnnnnnnnnnnnnnnnnnnnnnnnnnnnnnnnnnnnnnnnnnnnnnnnnnnnnnnnnnnnnnnnnnnnnnnnnnnnnnnnnnnnnnnnnnnnnnnnnnnnnnnnnnnnnnnnnnnnnnnnnnnnnnnnnnnnnnnnnnnnnnnnnnnnnnnnnnnnnnnnnnnnnnnnnnnnnnnnnnnnnnnnnnnnnnnnnnnnnnnnnnnnnnnnnnnnnnnnnnnnnnnnnnnnnnnnnnnnnnnnnnnnnnnnnnnnnnnnnnnnnnnnnnnnnnnnnnnnnnnnnnnnnnnnnnnnnnnnnnnnnnnnnnnnnnnnnnnnnnnnnnnnnnnnnnnnnnnnnnnnnnnnnnnnnnnnnnnnnnnnnnnnnnnnnnnnnnnnnnnnnnnnnnnnnnnnnnnnnnnnnnnnnnnnnnnnnnnnnnnnnnnnnnnnnnnnnnnnnnnnnnnnnnnnnnnnnnnnnnnnnnnnnnnnnnnnnnnnnnnnnnnnnnnnnnnnnnnnnnnnnnnnnnnnnnnnnnnnnnnnnnnnnnnnnnnnnnnnnnnnnnnnnnnnnnnnnnnnnnnnnnnnnnnnnnnnnnnnnnnnnnnnnnnnnnnnnnnnnnnnnnnnnnnnnnnnnnnnnnnnnnnnnnnnnnnnnnnnnnnnnnnnnnnnnnnnnnnnnnnnnnnnnnnnnnnnnnnnnnnnnnnnnnnnnnnnnnnnnnnnnnnnnnnnnnnnnnnnnnnnnnnnnnnnnnnnnnnnnnnnnnnnnnnnnnnnnnnnnnnnnnnnnnnnnnnnnnnnnnnnnnnnnnnnnnnnnnnnnnnnnnnnnnnnnnnnnnnnnnnnnnnnnnnnnnnnnnnnnnnnnnnnnnnnnnnnnnnnnnnnnnnnnnnnnnnnnnnnnnnnnnnnnnnnnnnnnnnnnnnnnnnnnnnnnnnnnnnnnnnnnnnnnnnnnnnnnnnnnnnnnnnnnnnnnnnnnnnnnnnnnnnnnnnnnnnnnnnnnnnnnnnnnnnnnnnnnnnnnnnnnnnnnnnnnnnnnnnnnnnnnnnnnnnnnnnnnnnnnnnnnnnnnnnnnnnnnnnnnnnnnnnnnnnnnnnnnnnnnnnnnnnnnnnnnnnnnnnnnnnnnnnnnnnnnnnnnnnnnnnnnnnnnnnnnnnnnnnnnnnnnnnnnnnnnnnnnnnnnnnnnnnnnnnnnnnnnnnnnnnnnnnnnnnnnnnnnnnnnnnnnnnnnnnnnnnnnnnnnnnnnnnnnnnnnnnnnnnnnnnnnnnnnnnnnnnnnnnnnnnnnnnnnnnnnnnnnnnnnnnnnnnnnnnnnnnnnnnnnnnnnnnnnnnnnnnnnnnnnnnnnnnnnnnnnnnnnnnnnnnnnnnnnnnnnnnnnnnnnnnnnnnnnnnnnnnnnnnnnnnnnnnnnnnnnnnnnnnnnnnnnnnnnnnnnnnnnnnnnnnnnnnnnnnnnnnnnnnnnnnnnnnnnnnnnnnnnnnnnnnnnnnnnnnnnnnnnnnnnnnnnnnnnnnnnnnnnnnnnnnnnnnnnnnnnnnnnnnnnnnnnnnnnnnnnnnnnnnnnnnnnnnnnnnnnnnnnnnnnnnnnnnnnnnnnnnnnnnnnnnnnnnnnnnnnnnnnnnnnnnnnnnnnnnnnnnnnnnnnnnnnnnnnnnnnnnnnnnnnnnnnnnnnnnnnnnnnnnnnnnnnnnnnnnnnnnnnnnnnnnnnnnnnnnnnnnnnnnnnnnnnnnnnnnnnnnnnnnnnnnnnnnnnnnnnnnnnnnnnnnnnnnnnnnnnnnnnnnnnnnnnnnnnnnnnnnnnnnnnnnnnnnnnnnnnnnnnnnnnnnnnnnnnnnnnnnnnnnnnnnnnnnnnnnnnnnnnnnnnnnnnnnnnnnnnnnnnnnnnnnnnnnnnnnnnnnnnnnnnnnnnnnnnnnnnnnnnnnnnnnnnnnnnnnnnnnnnnnnnnnnnnnnnnnnnnnnnnnnnnnnnnnnnnnnnnnnnnnnnnnnnnnnnnnnnnnnnnnnnnnnnnnnnnnnnnnnnnnnnnnnnnnnnnnnnnnnnnnnnnnnnnnnnnnnnnnnnnnnnnnnnnnnnnnnnnnnnnnnnnnnnnnnnnnnnnnnnnnnnnnnnnnnnnnnnnnnnnnnnnnnnnnnnnnnnnnnnnnnnnnnnnnnnnnnnnnnnnnnnnnnnnnnnnnnnnnnnnnnnnnnnnnnnnnnnnnnnnnnnnnnnnnnnnnnnnnnnnnnnnnnnnnnnnnnnnnnnnnnnnnnnnnnnnnnnnnnnnnnnnnnnnnnnnnnnnnnnnnnnnnnnnnnnnnnnnnnnnnnnnnnnnnnnnnnnnnnnnnnnnnnnnnnnnnnnnnnnnnnnnnnnnnnnnnnnnnnnnnnnnnnnnnnnnnnnnnnnnnnnnnnnnnnnnnnnnnnnnnnnnnnnnnnnnnnnnnnnnnnnnnnnnnnnnnnnnnnnnnnnnnnnnnnnnnnnnnnnnnnnnnnnnnnnnnnnnnnnnnnnnnnnnnnnnnnnnnnnnnnnnnnnnnnnnnnnnnnnnnnnnnnnnnnnnnnnnnnnnnnnnnnnnnnnnnnnnnnnnnnnnnnnnnnnnnnnnnnnnnnnnnnnnnnnnnnnnnnnnnnnnnnnnnnnnnnnnnnnnnnnnnnnnnnnnnnnnnnnnnnnnnnnnnnnnnnnnnnnnnnnnnnnnnnnnnnnnnnnnnnnnnnnnnnnnnnnnnnnnnnnnnnnnnnnnnnnnnnnnnnnnnnnnnnnnnnnnnnnnnnnnnnnnnnnnnnnnnnnnnnnnnnnnnnnnnnnnnnnnnnnnnnnnnnnnnnnnnnnnnnnnnnnnnnnnnnnnnnnnnnnnnnnnnnnnnnnnnnnnnnnnnnnnnnnnnnnnnnnnnnnnnnnnnnnnnnnnnnnnnnnnnnnnnnnnnnnnnnnnnnnnnnnnnnnnnnnnnnnnnnnnnnnnnnnnnnnnnnnnnnnnnnnnnnnnnnnnnnnnnnnnnnnnnnnnnnnnnnnnnnnnnnnnnnnnnnnnnnnnnnnnnnnnnnnnnnnnnnnnnnnnnnnnnnnnnnnnnnnnnnnnnnnnnnnnnnnnnnnnnnnnnnnnnnnnnnnnnnnnnnnnnnnnnnnnnnnnnnnnnnnnnnnnnnnnnnnnnnnnnnnnnnnnnnnnnnnnnnnnnnnnnnnnnnnnnnnnnnnnnnnnnnnnnnnnnnnnnnnnnnnnnnnnnnnnnnnnnnnnnnnnnnnnnnnnnnnnnnnnnnnnnnnnnnnnnnnnnnnnnnnnnnnnnnnnnnnnnnnnnnnnnnnnnnnnnnnnnnnnnnnnnnnnnnnnnnnnnnnnnnnnnnnnnnnnnnnnnnnnnnnnnnnnnnnnnnnnnnnnnnnnnnnnnnnnnnnnnnnnnnnnnnnnnnnnnnnnnnnnnnnnnnnnnnnnnnnnnnnnnnnnnnnnnnnnnnnnnnnnnnnnnnnnnnnnnnnnnnnnnnnnnnnnnnnnnnnnnnnnnnnnnnnnnnnnnnnnnnnnnnnnnnnnnnnnnnnnnnnnnnnnnnnnnnnnnnnnnnnnnnnnnnnnnnnnnnnnnnnnnnnnnnnnnnnnnnnnnnnnnnnnnnnnnnnnnnnnnnnnnnnnnnnnnnnnnnnnnnnnnnnnnnnnnnnnnnnnnnnnnnnnnnnnnnnnnnnnnnnnnnnnnnnnnnnnnnnnnnnnnnnnnnnnnnnnnnnnnnnnnnnnnnnnnnnnnnnnnnnnnnnnnnnnnnnnnnnnnnnnnnnnnnnnnnnnnnnnnnnnnnnnnnnnnnnnnnnnnnnnnnnnnnnnnnnnnnnnnnnnnnnnnnnnnnnnnnnnnnnnnnnnnnnnnnnnnnnnnnnnnnnnnnnnnnnnnnnnnnnnnnnnnnnnnnnnnnnnnnnnnnnnnnnnnnnnnnnnnnnnnnnnnnnnnnnnnnnnnnnnnnnnnnnnnnnnnnnnnnnnnnnnnnnnnnnnnnnnnnnnnnnnnnnnnnnnnnnnnnnnnnnnnnnnnnnnnnnnnnnnnnnnnnnnnnnnnnnnnnnnnnnnnnnnnnnnnnnnnnnnnnnnnnnnnnnnnnnnnnnnnnnnnnnnnnnnnnnnnnnnnnnnnnnnnnnnnnnnnnnnnnnnnnnnnnnnnnnnnnnnnnnnnnnnnnnnnnnnnnnnnnnnnnnnnnnnnnnnnnnnnnnnnnnnnnnnnnnnnnnnnnnnnnnnnnnnnnnnnnnnnnnnnnnnnnnnnnnnnnnnnnnnnnnnnnnnnnnnnnnnnnnnnnnnnnnnnnnnnnnnnnnnnnnnnnnnnnnnnnnnnnnnnnnnnnnnnnnnnnnnnnnnnnnnnnnnnnnnnnnnnnnnnnnnnnnnnnnnnnnnnnnnnnnnnnnnnnnnnnnnnnnnnnnnnnnnnnnnnnnnnnnnnnnnnnnnnnnnnnnnnnnnnnnnnnnnnnnnnnnnnnnnnnnnnnnnnnnnnnnnnnnnnnnnnnnnnnnnnnnnnnnnnnnnnnnnnnnnnnnnnnnnnnnnnnnnnnnnnnnnnnnnnnnnnnnnnnnnnnnnnnnnnnnnnnnnnnnnnnnnnnnnnnnnnnnnnnnnnnnnnnnnnnnnnnnnnnnnnnnnnnnnnnnnnnnnnnnnnnnnnnnnnnnnnnnnnnnnnnnnnnnnnnnnnnnnnnnnnnnnnnnnnnnnnnnnnnnnnnnnnnnnnnnnnnnnnnnnnnnnnnnnnnnnnnnnnnnnnnnnnnnnnnnnnnnnnnnnnnnnnnnnnnnnnnnnnnnnnnnnnnnnnnnnnnnnnnnnnnnnnnnnnnnnnnnnnnnnnnnnnnnnnnnnnnnnnnnnnnnnnnnnnnnnnnnnnnnnnnnnnnnnnnnnnnnnnnnnnnnnnnnnnnnnnnnnnnnnnnnnnnnnnnnnnnnnnnnnnnnnnnnnnnnnnnnnnnnnnnnnnnnnnnnnnnnnnnnnnnnnnnnnnnnnnnnnnnnnnnnnnnnnnnnnnnnnnnnnnnnnnnnnnnnnnnnnnnnnnnnnnnnnnnnnnnnnnnnnnnnnnnnnnnnnnnnnnnnnnnnnnnnnnnnnnnnnnnnnnnnnnnnnnnnnnnnnnnnnnnnnnnnnnnnnnnnnnnnnnnnnnnnnnnnnnnnnnnnnnnnnnnnnnnnnnnnnnnnnnnnnnnnnnnnnnnnnnnnnnnnnnnnnnnnnnnnnnnnnnnnnnnnnnnnnnnnnnnnnnnnnnnnnnnnnnnnnnnnnnnnnnnnnnnnnnnnnnnnnnnnnnnnnnnnnnnnnnnnnnnnnnnnnnnnnnnnnnnnnnnnnnnnnnnnnnnnnnnnnnnnnnnnnnnnnnnnnnnnnnnnnnnnnnnnnnnnnnnnnnnnnnnnnnnnnnnnnnnnnnnnnnnnnnnnnnnnnnnnnnnnnnnnnnnnnnnnnnnnnnnnnnnnnnnnnnnnnnnnnnnnnnnnnnnnnnnnnnnnnnnnnnnnnnnnnnnnnnnnnnnnnnnnnnnnnnnnnnnnnnnnnnnnnnnnnnnnnnnnnnnnnnnnnnnnnnnnnnnnnnnnnnnnnnnnnnnnnnnnnnnnnnnnnnnnnnnnnnnnnnnnnnnnnnnnnnnnnnnnnnnnnnnnnnnnnnnnnnnnnnnnnnnnnnnnnnnnnnnnnnnnnnnnnnnnnnnnnnnnnnnnnnnnnnnnnnnnnnnnnnnnnnnnnnnnnnnnnnnnnnnnnnnnnnnnnnnnnnnnnnnnnnnnnnnnnnnnnnnnnnnnnnnnnnnnnnnnnnnnnnnnnnnnnnnnnnnnnnnnnnnnnnnnnnnnnnnnnnnnnnnnnnnnnnnnnnnnnnnnnnnnnnnnnnnnnnnnnnnnnnnnnnnnnnnnnnnnnnnnnnnnnnnnnnnnnnnnnnnnnnnnnnnnnnnnnnnnnnnnnnnnnnnnnnnnnnnnnnnnnnnnnnnnnnnnnnnnnnnnnnnnnnnnnnnnnnnnnnnnnnnnnnnnnnnnnnnnnnnnnnnnnnnnnnnnnnnnnnnnnnnnnnnnnnnnnnnnnnnnnnnnnnnnnnnnnnnnnnnnnnnnnnnnnnnnnnnnnnnnnnnnnnnnnnnnnnnnnnnnnnnnnnnnnnnnnnnnnnnnnnnnnnnnnnnnnnnnnnnnnnnnnnnnnnnnnnnnnnnnnnnnnnnnnnnnnnnnnnnnnnnnnnnnnnnnnnnnnnnnnnnnnnnnnnnnnnnnnnnnnnnnnnnnnnnnnnnnnnnnnnnnnnnnnnnnnnnnnnnnnnnnnnnnnnnnnnnnnnnnnnnnnnnnnnnnnnnnnnnnnnnnnnnnnnnnnnnnnnnnnnnnnnnnnnnnnnnnnnnnnnnnnnnnnnnnnnnnnnnnnnnnnnnnnnnnnnnnnnnnnnnnnnnnnnnnnnnnnnnnnnnnnnnnnnnnnnnnnnnnnnnnnnnnnnnnnnnnnnnnnnnnnnnnnnnnnnnnnnnnnnnnnnnnnnnnnnnnnnnnnnnnnnnnnnnnnnnnnnnnnnnnnnnnnnnnnnnnnnnnnnnnnnnnnnnnnnnnnnnnnnnnnnnnnnnnnnnnnnnnnnnnnnnnnnnnnnnnnnnnnnnnnnnnnnnnnnnnnnnnnnnnnnnnnnnnnnnnnnnnnnnnnnnnnnnnnnnnnnnnnnnnnnnnnnnnnnnnnnnnnnnnnnnnnnnnnnnnnnnnnnnnnnnnnnnnnnnnnnnnnnnnnnnnnnnnnnnnnnnnnnnnnnnnnnnnnnnnnnnnnnnnnnnnnnnnnnnnnnnnnnnnnnnnnnnnnnnnnnnnnnnnnnnnnnnnnnnnnnnnnnnnnnnnnnnnnnnnnnnnnnnnnnnnnnnnnnnnnnnnnnnnnnnnnnnnnnnnnnnnnnnnnnnnnnnnnnnnnnnnnnnnnnnnnnnnnnnnnnnnnnnnnnnnnnnnnnnnnnnnnnnnnnnnnnnnnnnnnnnnnnnnnnnnnnnnnnnnnnnnnnnnnnnnnnnnnnnnnnnnnnnnnnnnnnnnnnnnnnnnnnnnnnnnnnnnnnnnnnnnnnnnnnnnnnnnnnnnnnnnnnnnnnnnnnnnnnnnnnnnnnnnnnnnnnnnnnnnnnnnnnnnnnnnnnnnnnnnnnnnnnnnnnnnnnnnnnnnnnnnnnnnnnnnnnnnnnnnnnnnnnnnnnnnnnnnnnnnnnnnnnnnnnnnnnnnnnnnnnnnnnnnnnnnnnnnnnnnnnnnnnnnnnnnnnnnnnnnnnnnnnnnnnnnnnnnnnnnnnnnnnnnnnnnnnnnnnnnnnnnnnnnnnnnnnnnnnnnnnnnnnnnnnnnnnnnnnnnnnnnnnnnnnnnnnnnnnnnnnnnnnnnnnnnnnnnnnnnnnnnnnnnnnnnnnnnnnnnnnnnnnnnnnnnnnnnnnnnnnnnnnnnnnnnnnnnnnnnnnnnnnnnnnnnnnnnnnnnnnnnnnnnnnnnnnnnnnnnnnnnnnnnnnnnnnnnnnnnnnnnnnnnnnnnnnnnnnnnnnnnnnnnnnnnnnnnnnnnnnnnnnnnnnnnnnnnnnnnnnnnnnnnnnnnnnnnnnnnnnnnnnnnnnnnnnnnnnnnnnnnnnnnnnnnnnnnnnnnnnnnnnnnnnnnnnnnnnnnnnnnnnnnnnnnnnnnnnnnnnnnnnnnnnnnnnnnnnnnnnnnnnnnnnnnnnnnnnnnnnnnnnnnnnnnnnnnnnnnnnnnnnnnnnnnnnnnnnnnnnnnnnnnnnnnnnnnnnnnnnnnnnnnnnnnnnnnnnnnnnnnnnnnnnnnnnnnnnnnnnnnnnnnnnnnnnnnnnnnnnnnnnnnnnnnnnnnnnnnnnnnnnnnnnnnnnnnnnnnnnnnnnnnnnnnnnnnnnnnnnnnnnnnnnnnnnnnnnnnnnnnnnnnnnnnnnnnnnnnnnnnnnnnnnnnnnnnnnnnnnnnnnnnnnnnnnnnnnnnnnnnnnnnnnnnnnnnnnnnnnnnnnnnnnnnnnnnnnnnnnnnnnnnnnnnnnnnnnnnnnnnnnnnnnnnnnnnnnnnnnnnnnnnnnnnnnnnnnnnnnnnnnnnnnnnnnnnnnnnnnnnnnnnnnnnnnnnnnnnnnnnnnnnnnnnnnnnnnnnnnnnnnnnnnnnnnnnnnnnnnnnnnnnnnnnnnnnnnnnnnnnnnnnnnnnnnnnnnnnnnnnnnnnnnnnnnnnnnnnnnnnnnnnnnnnnnnnnnnnnnnnnnnnnnnnnnnnnnnnnnnnnnnnnnnnnnnnnnnnnnnnnnnnnnnnnnnnnnnnnnnnnnnnnnnnnnnnnnnnnnnnnnnnnnnnnnnnnnnnnnnnnnnnnnnnnnnnnnnnnnnnnnnnnnnnnnnnnnnnnnnnnnnnnnnnnnnnnnnnnnnnnnnnnnnnnnnnnnnnnnnnnnnnnnnnnnnnnnnnnnnnnnnnnnnnnnnnnnnnnnnnnnnnnnnnnnnnnnnnnnnnnnnnnnnnnnnnnnnnnnnnnnnnnnnnnnnnnnnnnnnnnnnnnnnnnnnnnnnnnnnnnnnnnnnnnnnnnnnnnnnnnnnnnnnnnnnnnnnnnnnnnnnnnnnnnnnnnnnnnnnnnnnnnnnnnnnnnnnnnnnnnnnnnnnnnnnnnnnnnnnnnnnnnnnnnnnnnnnnnnnnnnnnnnnnnnnnnnnnnnnnnnnnnnnnnnnnnnnnnnnnnnnnnnnnnnnnnnnnnnnnnnnnnnnnnnnnnnnnnnnnnnnnnnnnnnnnnnnnnnnnnnnnnnnnnnnnnnnnnnnnnnnnnnnnnnnnnnnnnnnnnnnnnnnnnnnnnnnnnnnnnnnnnnnnnnnnnnnnnnnnnnnnnnnnnnnnnnnnnnnnnnnnnnnnnnnnnnnnnnnnnnnnnnnnnnnnnnnnnnnnnnnnnnnnnnnnnnnnnnnnnnnnnnnnnnnnnnnnnnnnnnnnnnnnnnnnnnnnnnnnnnnnnnnnnnnnnnnnnnnnnnnnnnnnnnnnnnnnnnnnnnnnnnnnnnnnnnnnnnnnnnnnnnnnnnnnnnnnnnnnnnnnnnnnnnnnnnnnnnnnnnnnnnnnnnnnnnnnnnnnnnnnnnnnnnnnnnnnnnnnnnnnnnnnnnnnnnnnnnnnnnnnnnnnnnnnnnnnnnnnnnnnnnnnnnnnnnnnnnnnnnnnnnnnnnnnnnnnnnnnnnnnnnnnnnnnnnnnnnnnnnnnnnnnnnnnnnnnnnnnnnnnnnnnnnnnnnnnnnnnnnnnnnnnnnnnnnnnnnnnnnnnnnnnnnnnnnnnnnnnnnnnnnnnnnnnnnnnnnnnnnnnnnnnnnnnnnnnnnnnnnnnnnnnnnnnnnnnnnnnnnnnnnnnnnnnnnnnnnnnnnnnnnnnnnnnnnnnnnnnnnnnnnnnnnnnnnnnnnnnnnnnnnnnnnnnnnnnnnnnnnnnnnnnnnnnnnnnnnnnnnnnnnnnnnnnnnnnnnnnnnnnnnnnnnnnnnnnnnnnnnnnnnnnnnnnnnnnnnnnnnnnnnnnnnnnnnnnnnnnnnnnnnnnnnnnnnnnnnnnnnnnnnnnnnnnnnnnnnnnnnnnnnnnnnnnnnnnnnnnnnnnnnnnnnnnnnnnnnnnnnnnnnnnnnnnnnnnnnnnnnnnnnnnnnnnnnnnnnnnnnnnnnnnnnnnnnnnnnnnnnnnnnnnnnnnnnnnnnnnnnnnnnnnnnnnnnnnnnnnnnnnnnnnnnnnnnnnnnnnnnnnnnnnnnnnnnnnnnnnnnnnnnnnnnnnnnnnnnnnnnnnnnnnnnnnnnnnnnnnnnnnnnnnnnnnnnnnnnnnnnnnnnnnnnnnnnnnnnnnnnnnnnnnnnnnnnnnnnnnnnnnnnnnnnnnnnnnnnnnnnnnnnnnnnnnnnnnnnnnnnnnnnnnnnnnnnnnnnnnnnnnnnnnnnnnnnnnnnnnnnnnnnnnnnnnnnnnnnnnnnnnnnnnnnnnnnnnnnnnnnnnnnnnnnnnnnnnnnnnnnnnnnnnnnnnnnnnnnnnnnnnnnnnnnnnnnnnnnnnnnnnnnnnnnnnnnnnnnnnnnnnnnnnnnnnnnnnnnnnnnnnnnnnnnnnnnnnnnnnnnnnnnnnnnnnnnnnnnnnnnnnnnnnnnnnnnnnnnnnnnnnnnnnnnnnnnnnnnnnnnnnnnnnnnnnnnnnnnnnnnnnnnnnnnnnnnnnnnnnnnnnnnnnnnnnnnnnnnnnnnnnnnnnnnnnnnnnnnnnnnnnnnnnnnnnnnnnnnnnnnnnnnnnnnnnnnnnnnnnnnnnnnnnnnnnnnnnnnnnnnnnnnnnnnnnnnnnnnnnnnnnnnnnnnnnnnnnnnnnnnnnnnnnnnnnnnnnnnnnnnnnnnnnnnnnnnnnnnnnnnnnnnnnnnnnnnnnnnnnnnnnnnnnnnnnnnnnnnnnnnnnnnnnnnnnnnnnnnnnnnnnnnnnnnnnnnnnnnnnnnnnnnnnnnnnnnnnnnnnnnnnnnnnnnnnnnnnnnnnnnnnnnnnnnnnnnnnnnnnnnnnnnnnnnnnnnnnnnnnnnnnnnnnnnnnnnnnnnnnnnnnnnnnnnnnnnnnnnnnnnnnnnnnnnnnnnnnnnnnnnnnnnnnnnnnnnnnnnnnnnnnnnnnnnnnnnnnnnnnnnnnnnnnnnnnnnnnnnnnnnnnnnnnnnnnnnnnnnnnnnnnnnnnnnnnnnnnnnnnnnnnnnnnnnnnnnnnnnnnnnnnnnnnnnnnnnnnnnnnnnnnnnnnnnnnnnnnnnnnnnnnnnnnnnnnnnnnnnnnnnnnnnnnnnnnnnnnnnnnnnnnnnnnnnnnnnnnnnnnnnnnnnnnnnnnnnnnnnnnnnnnnnnnnnnnnnnnnnnnnnnnnnnnnnnnnnnnnnnnnnnnnnnnnnnnnnnnnnnnnnnnnnnnnnnnnnnnnnnnnnnnnnnnnnnnnnnnnnnnnnnnnnnnnnnnnnnnnnnnnnnnnnnnnnnnnnnnnnnnnnnnnnnnnnnnnnnnnnnnnnnnnnnnnnnnnnnnnnnnnnnnnnnnnnnnnnnnnnnnnnnnnnnnnnnnnnnnnnnnnnnnnnnnnnnnnnnnnnnnnnnnnnnnnnnnnnnnnnnnnnnnnnnnnnnnnnnnnnnnnnnnnnnnnnnnnnnnnnnnnnnnnnnnnnnnnnnnnnnnnnnnnnnnnnnnnnnnnnnnnnnnnnnnnnnnnnnnnnnnnnnnnnnnnnnnnnnnnnnnnnnnnnnnnnnnnnnnnnnnnnnnnnnnnnnnnnnnnnnnnnnnnnnnnnnnnnnnnnnnnnnnnnnnnnnnnnnnnnnnnnnnnnnnnnnnnnnnnnnnnnnnnnnnnnnnnnnnnnnnnnnnnnnnnnnnnnnnnnnnnnnnnnnnnnnnnnnnnnnnnnnnnnnnnnnnnnnnnnnnnnnnnnnnnnnnnnnnnnnnnnnnnnnnnnnnnnnnnnnnnnnnnnnnnnnnnnnnnnnnnnnnnnnnnnnnnnnnnnnnnnnnnnnnnnnnnnnnnnnnnnnnnnnnnnnnnnnnnnnnnnnnnnnnnnnnnnnnnnnnnnnnnnnnnnnnnnnnnnnnnnnnnnnnnnnnnnnnnnnnnnnnnnnnnnnnnnnnnnnnnnnnnnnnnnnnnnnnnnnnnnnnnnnnnnnnnnnnnnnnnnnnnnnnnnnnnnnnnnnnnnnnnnnnnnnnnnnnnnnnnnnnnnnnnnnnnnnnnnnnnnnnnnnnnnnnnnnnnnnnnnnnnnnnnnnnnnnnnnnnnnnnnnnnnnnnnnnnnnnnnnnnnnnnnnnnnnnnnnnnnnnnnnnnnnnnnnnnnnnnnnnnnnnnnnnnnnnnnnnnnnnnnnnnnnnnnnnnnnnnnnnnnnnnnnnnnnnnnnnnnnnnnnnnnnnnnnnnnnnnnnnnnnnnnnnnnnnnnnnnnnnnnnnnnnnnnnnnnnnnnnnnnnnnnnnnnnnnnnnnnnnnnnnnnnnnnnnnnnnnnnnnnnnnnnnnnnnnnnnnnnnnnnnnnnnnnnnnnnnnnnnnnnnnnnnnnnnnnnnnnnnnnnnnnnnnnnnnnnnnnnnnnnnnnnnnnnnnnnnnnnnnnnnnnnnnnnnnnnnnnnnnnnnnnnnnnnnnnnnnnnnnnnnnnnnnnnnnnnnnnnnnnnnnnnnnnnnnnnnnnnnnnnnnnnnnnnnnnnnnnnnnnnnnnnnnnnnnnnnnnnnnnnnnnnnnnnnnnnnnnnnnnnnnnnnnnnnnnnnnnnnnnnnnnnnnnnnnnnnnnnnnnnnnnnnnnnnnnnnnnnnnnnnnnnnnnnnnnnnnnnnnnnnnnnnnnnnnnnnnnnnnnnnnnnnnnnnnnnnnnnnnnnnnnnnnnnnnnnnnnnnnnnnnnnnnnnnnnnnnnnnnnnnnnnnnnnnnnnnnnnnnnnnnnnnnnnnnnnnnnnnnnnnnnnnnnnnnnnnnnnnnnnnnnnnnnnnnnnnnnnnnnnnnnnnnnnnnnnnnnnnnnnnnnnnnnnnnnnnnnnnnnnnnnnnnnnnnnnnnnnnnnnnnnnnnnnnnnnnnnnnnnnnnnnnnnnnnnnnnnnnnnnnnnnnnnnnnnnnnnnnnnnnnnnnnnnnnnnnnnnnnnnnnnnnnnnnnnnnnnnnnnnnnnnnnnnnnnnnnnnnnnnnnnnnnnnnnnnnnnnnnnnnnnnnnnnnnnnnnnnnnnnnnnnnnnnnnnnnnnnnnnnnnnnnnnnnnnnnnnnnnnnnnnnnnnnnnnnnnnnnnnnnnnnnnnnnnnnnnnnnnnnnnnnnnnnnnnnnnnnnnnnnnnnnnnnnnnnnnnnnnnnnnnnnnnnnnnnnnnnnnnnnnnnnnnnnnnnnnnnnnnnnnnnnnnnnnnnnnnnnnnnnnnnnnnnnnnnnnnnnnnnnnnnnnnnnnnnnnnnnnnnnnnnnnnnnnnnnnnnnnnnnnnnnnnnnnnnnnnnnnnnnnnnnnnnnnnnnnnnnnnnnnnnnnnnnnnnnnnnnnnnnnnnnnnnnnnnnnnnnnnnnnnnnnnnnnnnnnnnnnnnnnnnnnnnnnnnnnnnnnnnnnnnnnnnnnnnnnnnnnnnnnnnnnnnnnnnnnnnnnnnnnnnnnnnnnnnnnnnnnnnnnnnnnnnnnnnnnnnnnnnnnnnnnnnnnnnnnnnnnnnnnnnnnnnnnnnnnnnnnnnnnnnnnnnnnnnnnnnnnnnnnnnnnnnnnnnnnnnnnnnnnnnnnnnnnnnnnnnnnnnnnnnnnnnnnnnnnnnnnnnnnnnnnnnnnnnnnnnnnnnnnnnnnnnnnnnnnnnnnnnnnnnnnnnnnnnnnnnnnnnnnnnnnnnnnnnnnnnnnnnnnnnnnnnnnnnnnnnnnnnnnnnnnnnnnnnnnnnnnnnnnnnnnnnnnnnnnnnnnnnnnnnnnnnnnnnnnnnnnnnnnnnnnnnnnnnnnnnnnnnnnnnnnnnnnnnnnnnnnnnnnnnnnnnnnnnnnnnnnnnnnnnnnnnnnnnnnnnnnnnnnnnnnnnnnnnnnnnnnnnnnnnnnnnnnnnnnnnnnnnnnnnnnnnnnnnnnnnnnnnnnnnnnnnnnnnnnnnnnnnnnnnnnnnnnnnnnnnnnnnnnnnnnnnnnnnnnnnnnnnnnnnnnnnnnnnnnnnnnnnnnnnnnnnnnnnnnnnnnnnnnnnnnnnnnnnnnnnnnnnnnnnnnnnnnnnnnnnnnnnnnnnnnnnnnnnnnnnnnnnnnnnnnnnnnnnnnnnnnnnnnnnnnnnnnnnnnnnnnnnnnnnnnnnnnnnnnnnnnnnnnnnnnnnnnnnnnnnnnnnnnnnnnnnnnnnnnnnnnnnnnnnnnnnnnnnnnnnnnnnnnnnnnnnnnnnnnnnnnnnnnnnnnnnnnnnnnnnnnnnnnnnnnnnnnnnnnnnnnnnnnnnnnnnnnnnnnnnnnnnnnnnnnnnnnnnnnnnnnnnnnnnnnnnnnnnnnnnnnnnnnnnnnnnnnnnnnnnnnnnnnnnnnnnnnnnnnnnnnnnnnnnnnnnnnnnnnnnnnnnnnnnnnnnnnnnnnnnnnnnnnnnnnnnnnnnnnnnnnnnnnnnnnnnnnnnnnnnnnnnnnnnnnnnnnnnnnnnnnnnnnnnnnnnnnnnnnnnnnnnnnnnnnnnnnnnnnnnnnnnnnnnnnnnnnnnnnnnnnnnnnnnnnnnnnnnnnnnnnnnnnnnnnnnnnnnnnnnnnnnnnnnnnnnnnnnnnnnnnnnnnnnnnnnnnnnnnnnnnnnnnnnnnnnnnnnnnnnnnnnnnnnnnnnnnnnnnnnnnnnnnnnnnnnnnnnnnnnnnnnnnnnnnnnnnnnnnnnnnnnnnnnnnnnnnnnnnnnnnnnnnnnnnnnnnnnnnnnnnnnnnnnnnnnnnnnnnnnnnnnnnnnnnnnnnnnnnnnnnnnnnnnnnnnnnnnnnnnnnnnnnnnnnnnnnnnnnnnnnnnnnnnnnnnnnnnnnnnnnnnnnnnnnnnnnnnnnnnnnnnnnnnnnnnnnnnnnnnnnnnnnnnnnnnnnnnnnnnnnnnnnnnnnnnnnnnnnnnnnnnnnnnnnnnnnnnnnnnnnnnnnnnnnnnnnnnnnnnnnnnnnnnnnnnnnnnnnnnnnnnnnnnnnnnnnnnnnnnnnnnnnnnnnnnnnnnnnnnnnnnnnnnnnnnnnnnnnnnnnnnnnnnnnnnnnnnnnnnnnnnnnnnnnnnnnnnnnnnnnnnnnnnnnnnnnnnnnnnnnnnnnnnnnnnnnnnnnnnnnnnnnnnnnnnnnnnnnnnnnnnnnnnnnnnnnnnnnnnnnnnnnnnnnnnnnnnnnnnnnnnnnnnnnnnnnnnnnnnnnnnnnnnnnnnnnnnnnnnnnnnnnnnnnnnnnnnnnnnnnnnnnnnnnnnnnnnnnnnnnnnnnnnnnnnnnnnnnnnnnnnnnnnnnnnnnnnnnnnnnnnnnnnnnnnnnnnnnnnnnnnnnnnnnnnnnnnnnnnnnnnnnnnnnnnnnnnnnnnnnnnnnnnnnnnnnnnnnnnnnnnnnnnnnnnnnnnnnnnnnnnnnnnnnnnnnnnnnnnnnnnnnnnnnnnnnnnnnnnnnnnnnnnnnnnnnnnnnnnnnnnnnnnnnnnnnnnnnnnnnnnnnnnnnnnnnnnnnnnnnnnnnnnnnnnnnnnnnnnnnnnnnnnnnnnnnnnnnnnnnnnnnnnnnnnnnnnnnnnnnnnnnnnnnnnnnnnnnnnnnnnnnnnnnnnnnnnnnnnnnnnnnnnnnnnnnnnnnnnnnnnnnnnnnnnnnnnnnnnnnnnnnnnnnnnnnnnnnnnnnnnnnnnnnnnnnnnnnnnnnnnnnnnnnnnnnnnnnnnnnnnnnnnnnnnnnnnnnnnnnnnnnnnnnnnnnnnnnnnnnnnnnnnnnnnnnnnnnnnnnnnnnnnnnnnnnnnnnnnnnnnnnnnnnnnnnnnnnnnnnnnnnnnnnnnnnnnnnnnnnnnnnnnnnnnnnnnnnnnnnnnnnnnnnnnnnnnnnnnnnnnnnnnnnnnnnnnnnnnnnnnnnnnnnnnnnnnnnnnnnnnnnnnnnnnnnnnnnnnnnnnnnnnnnnnnnnnnnnnnnnnnnnnnnnnnnnnnnnnnnnnnnnnnnnnnnnnnnnnnnnnnnnnnnnnnnnnnnnnnnnnnnnnnnnnnnnnnnnnnnnnnnnnnnnnnnnnnnnnnnnnnnnnnnnnnnnnnnnnnnnnnnnnnnnnnnnnnnnnnnnnnnnnnnnnnnnnnnnnnnnnnnnnnnnnnnnnnnnnnnnnnnnnnnnnnnnnnnnnnnnnnnnnnnnnnnnnnnnnnnnnnnnnnnnnnnnnnnnnnnnnnnnnnnnnnnnnnnnnnnnnnnnnnnnnnnnnnnnnnnnnnnnnnnnnnnnnnnnnnnnnnnnnnnnnnnnnnnnnnnnnnnnnnnnnnnnnnnnnnnnnnnnnnnnnnnnnnnnnnnnnnnnnnnnnnnnnnnnnnnnnnnnnnnnnnnnnnnnnnnnnnnnnnnnnnnnnnnnnnnnnnnnnnnnnnnnnnnnnnnnnnnnnnnnnnnnnnnnnnnnnnnnnnnnnnnnnnnnnnnnnnnnnnnnnnnnnnnnnnnnnnnnnnnnnnnnnnnnnnnnnnnnnnnnnnnnnnnnnnnnnnnnnnnnnnnnnnnnnnnnnnnnnnnnnnnnnnnnnnnnnnnnnnnnnnnnnnnnnnnnnnnnnnnnnnnnnnnnnnnnnnnnnnnnnnnnnnnnnnnnnnnnnnnnnnnnnnnnnnnnnnnnnnnnnnnnnnnnnnnnnnnnnnnnnnnnnnnnnnnnnnnnnnnnnnnnnnnnnnnnnnnnnnnnnnnnnnnnnnnnnnnnnnnnnnnnnnnnnnnnnnnnnnnnnnnnnnnnnnnnnnnnnnnnnnnnnnnnnnnnnnnnnnnnnnnnnnnnnnnnnnnnnnnnnnnnnnnnnnnnnnnnnnnnnnnnnnnnnnnnnnnnnnnnnnnnnnnnnnnnnnnnnnnnnnnnnnnnnnnnnnnnnnnnnnnnnnnnnnnnnnnnnnnnnnnnnnnnnnnnnnnnnnnnnnnnnnnnnnnnnnnnnnnnnnnnnnnnnnnnnnnnnnnnnnnnnnnnnnnnnnnnnnnnnnnnnnnnnnnnnnnnnnnnnnnnnnnnnnnnnnnnnnnnnnnnnnnnnnnnnnnnnnnnnnnnnnnnnnnnnnnnnnnnnnnnnnnnnnnnnnnnnnnnnnnnnnnnnnnnnnnnnnnnnnnnnnnnnnnnnnnnnnnnnnnnnnnnnnnnnnnnnnnnnnnnnnnnnnnnnnnnnnnnnnnnnnnnnnnnnnnnnnnnnnnnnnnnnnnnnnnnnnnnnnnnnnnnnnnnnnnnnnnnnnnnnnnnnnnnnnnnnnnnnnnnnnnnnnnnnnnnnnnnnnnnnnnnnnnnnnnnnnnnnnnnnnnnnnnnnnnnnnnnnnnnnnnnnnnnnnnnnnnnnnnnnnnnnnnnnnnnnnnnnnnnnnnnnnnnnnnnnnnnnnnnnnnnnnnnnnnnnnnnnnnnnnnnnnnnnnnnnnnnnnnnnnnnnnnnnnnnnnnnnnnnnnnnnnnnnnnnnnnnnnnnnnnnnnnnnnnnnnnnnnnnnnnnnnnnnnnnnnnnnnnnnnnnnnnnnnnnnnnnnnnnnnnnnnnnnnnnnnnnnnnnnnnnnnnnnnnnnnnnnnnnnnnnnnnnnnnnnnnnnnnnnnnnnnnnnnnnnnnnnnnnnnnnnnnnnnnnnnnnnnnnnnnnnnnnnnnnnnnnnnnnnnnnnnnnnnnnnnnnnnnnnnnnnnnnnnnnnnnnnnnnnnnnnnnnnnnnnnnnnnnnnnnnnnnnnnnnnnnnnnnnnnnnnnnnnnnnnnnnnnnnnnnnnnnnnnnnnnnnnnnnnnnnnnnnnnnnnnnnnnnnnnnnnnnnnnnnnnnnnnnnnnnnnnnnnnnnnnnnnnnnnnnnnnnnnnnnnnnnnnnnnnnnnnnnnnnnnnnnnnnnnnnnnnnnnnnnnnnnnnnnnnnnnnnnnnnnnnnnnnnnnnnnnnnnnnnnnnnnnnnnnnnnnnnnnnnnnnnnnnnnnnnnnnnnnnnnnnnnnnnnnnnnnnnnnnnnnnnnnnnnnnnnnnnnnnnnnnnnnnnnnnnnnnnnnnnnnnnnnnnnnnnnnnnnnnnnnnnnnnnnnnnnnnnnnnnnnnnnnnnnnnnnnnnnnnnnnnnnnnnnnnnnnnnnnnnnnnnnnnnnnnnnnnnnnnnnnnnnnnnnnnnnnnnnnnnnnnnnnnnnnnnnnnnnnnnnnnnnnnnnnnnnnnnnnnnnnnnnnnnnnnnnnnnnnnnnnnnnnnnnnnnnnnnnnnnnnnnnnnnnnnnnnnnnnnnnnnnnnnnnnnnnnnnnnnnnnnnnnnnnnnnnnnnnnnnnnnnnnnnnnnnnnnnnnnnnnnnnnnnnnnnnnnnnnnnnnnnnnnnnnnnnnnnnnnnnnnnnnnnnnnnnnnnnnnnnnnnnnnnnnnnnnnnnnnnnnnnnnnnnnnnnnnnnnnnnnnnnnnnnnnnnnnnnnnnnnnnnnnnnnnnnnnnnnnnnnnnnnnnnnnnnnnnnnnnnnnnnnnnnnnnnnnnnnnnnnnnnnnnnnnnnnnnnnnnnnnnnnnnnnnnnnnnnnnnnnnnnnnnnnnnnnnnnnnnnnnnnnnnnnnnnnnnnnnnnnnnnnnnnnnnnnnnnnnnnnnnnnnnnnnnnnnnnnnnnnnnnnnnnnnnnnnnnnnnnnnnnnnnnnnnnnnnnnnnnnnnnnnnnnnnnnnnnnnnnnnnnnnnnnnnnnnnnnnnnnnnnnnnnnnnnnnnnnnnnnnnnnnnnnnnnnnnnnnnnnnnnnnnnnnnnnnnnnnnnnnnnnnnnnnnnnnnnnnnnnnnnnnnnnnnnnnnnnnnnnnnnnnnnnnnnnnnnnnnnnnnnnnnnnnnnnnnnnnnnnnnnnnnnnnnnnnnnnnnnnnnnnnnnnnnnnnnnnnnnnnnnnnnnnnnnnnnnnnnnnnnnnnnnnnnnnnnnnnnnnnnnnnnnnnnnnnnnnnnnnnnnnnnnnnnnnnnnnnnnnnnnnnnnnnnnnnnnnnnnnnnnnnnnnnnnnnnnnnnnnnnnnnnnnnnnnnnnnnnnnnnnnnnnnnnnnnnnnnnnnnnnnnnnnnnnnnnnnnnnnnnnnnnnnnnnnnnnnnnnnnnnnnnnnnnnnnnnnnnnnnnnnnnnnnnnnnnnnnnnnnnnnnnnnnnnnnnnnnnnnnnnnnnnnnnnnnnnnnnnnnnnnnnnnnnnnnnnnnnnnnnnnnnnnnnnnnnnnnnnnnnnnnnnnnnnnnnnnnnnnnnnnnnnnnnnnnnnnnnnnnnnnnnnnnnnnnnnnnnnnnnnnnnnnnnnnnnnnnnnnnnnnnnnnnnnnnnnnnnnnnnnnnnnnnnnnnnnnnnnnnnnnnnnnnnnnnnnnnnnnnnnnnnnnnnnnnnnnnnnnnnnnnnnnnnnnnnnnnnnnnnnnnnnnnnnnnnnnnnnnnnnnnnnnnnnnnnnnnnnnnnnnnnnnnnnnnnnnnnnnnnnnnnnnnnnnnnnnnnnnnnnnnnnnnnnnnnnnnnnnnnnnnnnnnnnnnnnnnnnnnnnnnnnnnnnnnnnnnnnnnnnnnnnnnnnnnnnnnnnnnnnnnnnnnnnnnnnnnnnnnnnnnnnnnnnnnnnnnnnnnnnnnnnnnnnnnnnnnnnnnnnnnnnnnnnnnnnnnnnnnnnnnnnnnnnnnnnnnnnnnnnnnnnnnnnnnnnnnnnnnnnnnnnnnnnnnnnnnnnnnnnnnnnnnnnnnnnnnnnnnnnnnnnnnnnnnnnnnnnnnnnnnnnnnnnnnnnnnnnnnnnnnnnnnnnnnnnnnnnnnnnnnnnnnnnnnnnnnnnnnnnnnnnnnnnnnnnnnnnnnnnnnnnnnnnnnnnnnnnnnnnnnnnnnnnnnnnnnnnnnnnnnnnnnnnnnnnnnnnnnnnnnnnnnnnnnnnnnnnnnnnnnnnnnnnnnnnnnnnnnnnnnnnnnnnnnnnnnnnnnnnnnnnnnnnnnnnnnnnnnnnnnnnnnnnnnnnnnnnnnnnnnnnnnnnnnnnnnnnnnnnnnnnnnnnnnnnnnnnnnnnnnnnnnnnnnnnnnnnnnnnnnnnnnnnnnnnnnnnnnnnnnnnnnnnnnnnnnnnnnnnnnnnnnnnnnnnnnnnnnnnnnnnnnnnnnnnnnnnnnnnnnnnnnnnnnnnnnnnnnnnnnnnnnnnnnnnnnnnnnnnnnnnnnnnnnnnnnnnnnnnnnnnnnnnnnnnnnnnnnnnnnnnnnnnnnnnnnnnnnnnnnnnnnnnnnnnnnnnnnnnnnnnnnnnnnnnnnnnnnnnnnnnnnnnnnnnnnnnnnnnnnnnnnnnnnnnnnnnnnnnnnnnnnnnnnnnnnnnnnnnnnnnnnnnnnnnnnnnnnnnnnnnnnnnnnnnnnnnnnnnnnnnnnnnnnnnnnnnnnnnnnnnnnnnnnnnnnnnnnnnnnnnnnnnnnnnnnnnnnnnnnnnnnnnnnnnnnnnnnnnnnnnnnnnnnnnnnnnnnnnnnnnnnnnnnnnnnnnnnnnnnnnnnnnnnnnnnnnnnnnnnnnnnnnnnnnnnnnnnnnnnnnnnnnnnnnnnnnnnnnnnnnnnnnnnnnnnnnnnnnnnnnnnnnnnnnnnnnnnnnnnnnnnnnnnnnnnnnnnnnnnnnnnnnnnnnnnnnnnnnnnnnnnnnnnnnnnnnnnnnnnnnnnnnnnnnnnnnnnnnnnnnnnnnnnnnnnnnnnnnnnnnnnnnnnnnnnnnnnnnnnnnnnnnnnnnnnnnnnnnnnnnnnnnnnnnnnnnnnnnnnnnnnnnnnnnnnnnnnnnnnnnnnnnnnnnnnnnnnnnnnnnnnnnnnnnnnnnnnnnnnnnnnnnnnnnnnnnnnnnnnnnnnnnnnnnnnnnnnnnnnnnnnnnnnnnnnnnnnnnnnnnnnnnnnnnnnnnnnnnnnnnnnnnnnnnnnnnnnnnnnnnnnnnnnnnnnnnnnnnnnnnnnnnnnnnnnnnnnnnnnnnnnnnnnnnnnnnnnnnnnnnnnnnnnnnnnnnnnnnnnnnnnnnnnnnnnnnnnnnnnnnnnnnnnnnnnnnnnnnnnnnnnnnnnnnnnnnnnnnnnnnnnnnnnnnnnnnnnnnnnnnnnnnnnnnnnnnnnnnnnnnnnnnnnnnnnnnnnnnnnnnnnnnnnnnnnnnnnnnnnnnnnnnnnnnnnnnnnnnnnnnnnnnnnnnnnnnnnnnnnnnnnnnnnnnnnnnnnnnnnnnnnnnnnnnnnnnnnnnnnnnnnnnnnnnnnnnnnnnnnnnnnnnnnnnnnnnnnnnnnnnnnnnnnnnnnnnnnnnnnnnnnnnnnnnnnnnnnnnnnnnnnnnnnnnnnnnnnnnnnnnnnnnnnnnnnnnnnnnnnnnnnnnnnnnnnnnnnnnnnnnnnnnnnnnnnnnnnnnnnnnnnnnnnnnnnnnnnnnnnnnnnnnnnnnnnnnnnnnnnnnnnnnnnnnnnnnnnnnnnnnnnnnnnnnnnnnnnnnnnnnnnnnnnnnnnnnnnnnnnnnnnnnnnnnnnnnnnnnnnnnnnnnnnnnnnnnnnnnnnnnnnnnnnnnnnnnnnnnnnnnnnnnnnnnnnnnnnnnnnnnnnnnnnnnnnnnnnnnnnnnnnnnnnnnnnnnnnnnnnnnnnnnnnnnnnnnnnnnnnnnnnnnnnnnnnnnnnnnnnnnnnnnnnnnnnnnnnnnnnnnnnnnnnnnnnnnnnnnnnnnnnnnnnnnnnnnnnnnnnnnnnnnnnnnnnnnnnnnnnnnnnnnnnnnnnnnnnnnnnnnnnnnnnnnnnnnnnnnnnnnnnnnnnnnnnnnnnnnnnnnnnnnnnnnnnnnnnnnnnnnnnnnnnnnnnnnnnnnnnnnnnnnnnnnnnnnnnnnnnnnnnnnnnnnnnnnnnnnnnnnnnnnnnnnnnnnnnnnnnnnnnnnnnnnnnnnnnnnnnnnnnnnnnnnnnnnnnnnnnnnnnnnnnnnnnnnnnnnnnnnnnnnnnnnnnnnnnnnnnnnnnnnnnnnnnnnnnnnnnnnnnnnnnnnnnnnnnnnnnnnnnnnnnnnnnnnnnnnnnnnnnnnnnnnnnnnnnnnnnnnnnnnnnnnnnnnnnnnnnnnnnnnnnnnnnnnnnnnnnnnnnnnnnnnnnnnnnnnnnnnnnnnnnnnnnnnnnnnnnnnnnnnnnnnnnnnnnnnnnnnnnnnnnnnnnnnnnnnnnnnnnnnnnnnnnnnnnnnnnnnnnnnnnnnnnnnnnnnnnnnnnnnnnnnnnnnnnnnnnnnnnnnnnnnnnnnnnnnnnnnnnnnnnnnnnnnnnnnnnnnnnnnnnnnnnnnnnnnnnnnnnnnnnnnnnnnnnnnnnnnnnnnnnnnnnnnnnnnnnnnnnnnnnnnnnnnnnnnnnnnnnnnnnnnnnnnnnnnnnnnnnnnnnnnnnnnnnnnnnnnnnnnnnnnnnnnnnnnnnnnnnnnnnnnnnnnnnnnnnnnnnnnnnnnnnnnnnnnnnnnnnnnnnnnnnnnnnnnnnnnnnnnnnnnnnnnnnnnnnnnnnnnnnnnnnnnnnnnnnnnnnnnnnnnnnnnnnnnnnnnnnnnnnnnnnnnnnnnnnnnnnnnnnnnnnnnnnnnnnnnnnnnnnnnnnnnnnnnnnnnnnnnnnnnnnnnnnnnnnnnnnnnnnnnnnnnnnnnnnnnnnnnnnnnnnnnnnnnnnnnnnnnnnnnnnnnnnnnnnnnnnnnnnnnnnnnnnnnnnnnnnnnnnnnnnnnnnnnnnnnnnnnnnnnnnnnnnnnnnnnnnnnnnnnnnnnnnnnnnnnnnnnnnnnnnnnnnnnnnnnnnnnnnnnnnnnnnnnnnnnnnnnnnnnnnnnnnnnnnnnnnnnnnnnnnnnnnnnnnnnnnnnnnnnnnnnnnnnnnnnnnnnnnnnnnnnnnnnnnnnnnnnnnnnnnnnnnnnnnnnnnnnnnnnnnnnnnnnnnnnnnnnnnnnnnnnnnnnnnnnnnnnnnnnnnnnnnnnnnnnnnnnnnnnnnnnnnnnnnnnnnnnnnnnnnnnnnnnnnnnnnnnnnnnnnnnnnnnnnnnnnnnnnnnnnnnnnnnnnnnnnnnnnnnnnnnnnnnnnnnnnnnnnnnnnnnnnnnnnnnnnnnnnnnnnnnnnnnnnnnnnnnnnnnnnnnnnnnnnnnnnnnnnnnnnnnnnnnnnnnnnnnnnnnnnnnnnnnnnnnnnnnnnnnnnnnnnnnnnnnnnnnnnnnnnnnnnnnnnnnnnnnnnnnnnnnnnnnnnnnnnnnnnnnnnnnnnnnnnnnnnnnnnnnnnnnnnnnnnnnnnnnnnnnnnnnnnnnnnnnnnnnnnnnnnnnnnnnnnnnnnnnnnnnnnnnnnnnnnnnnnnnnnnnnnnnnnnnnnnnnnnnnnnnnnnnnnnnnnnnnnnnnnnnnnnnnnnnnnnnnnnnnnnnnnnnnnnnnnnnnnnnnnnnnnnnnnnnnnnnnnnnnnnnnnnnnnnnnnnnnnnnnnnnnnnnnnnnnnnnnnnnnnnnnnnnnnnnnnnnnnnnnnnnnnnnnnnnnnnnnnnnnnnnnnnnnnnnnnnnnnnnnnnnnnnnnnnnnnnnnnnnnnnnnnnnnnnnnnnnnnnnnnnnnnnnnnnnnnnnnnnnnnnnnnnnnnnnnnnnnnnnnnnnnnnnnnnnnnnnnnnnnnnnnnnnnnnnnnnnnnnnnnnnnnnnnnnnnnnnnnnnnnnnnnnnnnnnnnnnnnnnnnnnnnnnnnnnnnnnnnnnnnnnnnnnnnnnnnnnnnnnnnnnnnnnnnnnnnnnnnnnnnnnnnnnnnnnnnnnnnnnnnnnnnnnnnnnnnnnnnnnnnnnnnnnnnnnnnnnnnnnnnnnnnnnnnnnnnnnnnnnnnnnnnnnnnnnnnnnnnnnnnnnnnnnnnnnnnnnnnnnnnnnnnnnnnnnnnnnnnnnnnnnnnnnnnnnnnnnnnnnnnnnnnnnnnnnnnnnnnnnnnnnnnnnnnnnnnnnnnnnnnnnnnnnnnnnnnnnnnnnnnnnnnnnnnnnnnnnnnnnnnnnnnnnnnnnnnnnnnnnnnnnnnnnnnnnnnnnnnnnnnnnnnnnnnnnnnnnnnnnnnnnnnnnnnnnnnnnnnnnnnnnnnnnnnnnnnnnnnnnnnnnnnnnnnnnnnnnnnnnnnnnnnnnnnnnnnnnnnnnnnnnnnnnnnnnnnnnnnnnnnnnnnnnnnnnnnnnnnnnnnnnnnnnnnnnnnnnnnnnnnnnnnnnnnnnnnnnnnnnnnnnnnnnnnnnnnnnnnnnnnnnnnnnnnnnnnnnnnnnnnnnnnnnnnnnnnnnnnnnnnnnnnnnnnnnnnnnnnnnnnnnnnnnnnnnnnnnnnnnnnnnnnnnnnnnnnnnnnnnnnnnnnnnnnnnnnnnnnnnnnnnnnnnnnnnnnnnnnnnnnnnnnnnnnnnnnnnnnnnnnnnnnnnnnnnnnnnnnnnnnnnnnnnnnnnnnnnnnnnnnnnnnnnnnnnnnnnnnnnnnnnnnnnnnnnnnnnnnnnnnnnnnnnnnnnnnnnnnnnnnnnnnnnnnnnnnnnnnnnnnnnnnnnnnnnnnnnnnnnnnnnnnnnnnnnnnnnnnnnnnnnnnnnnnnnnnnnnnnnnnnnnnnnnnnnnnnnnnnnnnnnnnnnnnnnnnnnnnnnnnnnnnnnnnnnnnnnnnnnnnnnnnnnnnnnnnnnnnnnnnnnnnnnnnnnnnnnnnnnnnnnnnnnnnnnnnnnnnnnnnnnnnnnnnnnnnnnnnnnnnnnnnnnnnnnnnnnnnnnnnnnnnnnnnnnnnnnnnnnnnnnnnnnnnnnnnnnnnnnnnnnnnnnnnnnnnnnnnnnnnnnnnnnnnnnnnnnnnnnnnnnnnnnnnnnnnnnnnnnnnnnnnnnnnnnnnnnnnnnnnnnnnnnnnnnnnnnnnnnnnnnnnnnnnnnnnnnnnnnnnnnnnnnnnnnnnnnnnnnnnnnnnnnnnnnnnnnnnnnnnnnnnnnnnnnnnnnnnnnnnnnnnnnnnnnnnnnnnnnnnnnnnnnnnnnnnnnnnnnnnnnnnnnnnnnnnnnnnnnnnnnnnnnnnnnnnnnnnnnnnnnnnnnnnnnnnnnnnnnnnnnnnnnnnnnnnnnnnnnnnnnnnnnnnnnnnnnnnnnnnnnnnnnnnnnnnnnnnnnnnnnnnnnnnnnnnnnnnnnnnnnnnnnnnnnnnnnnnnnnnnnnnnnnnnnnnnnnnnnnnnnnnnnnnnnnnnnnnnnnnnnnnnnnnnnnnnnnnnnnnnnnnnnnnnnnnnnnnnnnnnnnnnnnnnnnnnnnnnnnnnnnnnnnnnnnnnnnnnnnnnnnnnnnnnnnnnnnnnnnnnnnnnnnnnnnnnnnnnnnnnnnnnnnnnnnnnnnnnnnnnnnnnnnnnnnnnnnnnnnnnnnnnnnnnnnnnnnnnnnnnnnnnnnnnnnnnnnnnnnnnnnnnnnnnnnnnnnnnnnnnnnnnnnnnnnnnnnnnnnnnnnnnnnnnnnnnnnnnnnnnnnnnnnnnnnnnnnnnnnnnnnnnnnnnnnnnnnnnnnnnnnnnnnnnnnnnnnnnnnnnnnnnnnnnnnnnnnnnnnnnnnnnnnnnnnnnnnnnnnnnnnnnnnnnnnnnnnnnnnnnnnnnnnnnnnnnnnnnnnnnnnnnnnnnnnnnnnnnnnnnnnnnnnnnnnnnnnnnnnnnnnnnnnnnnnnnnnnnnnnnnnnnnnnnnnnnnnnnnnnnnnnnnnnnnnnnnnnnnnnnnnnnnnnnnnnnnnnnnnnnnnnnnnnnnnnnnnnnnnnnnnnnnnnnnnnnnnnnnnnnnnnnnnnnnnnnnnnnnnnnnnnnnnnnnnnnnnnnnnnnnnnnnnnnnnnnnnnnnnnnnnnnnnnnnnnnnnnnnnnnnnnnnnnnnnnnnnnnnnnnnnnnnnnnnnnnnnnnnnnnnnnnnnnnnnnnnnnnnnnnnnnnnnnnnnnnnnnnnnnnnnnnnnnnnnnnnnnnnnnnnnnnnnnnnnnnnnnnnnnnnnnnnnnnnnnnnnnnnnnnnnnnnnnnnnnnnnnnnnnnnnnnnnnnnnnnnnnnnnnnnnnnnnnnnnnnnnnnnnnnnnnnnnnnnnnnnnnnnnnnnnnnnnnnnnnnnnnnnnnnnnnnnnnnnnnnnnnnnnnnnnnnnnnnnnnnnnnnnnnnnnnnnnnnnnnnnnnnnnnnnnnnnnnnnnnnnnnnnnnnnnnnnnnnnnnnnnnnnnnnnnnnnnnnnnnnnnnnnnnnnnnnnnnnnnnnnnnnnnnnnnnnnnnnnnnnnnnnnnnnnnnnnnnnnnnnnnnnnnnnnnnnnnnnnnnnnnnnnnnnnnnnnnnnnnnnnnnnnnnnnnnnnnnnnnnnnnnnnnnnnnnnnnnnnnnnnnnnnnnnnnnnnnnnnnnnnnnnnnnnnnnnnnnnnnnnnnnnnnnnnnnnnnnnnnnnnnnnnnnnnnnnnnnnnnnnnnnnnnnnnnnnnnnnnnnnnnnnnnnnnnnnnnnnnnnnnnnnnnnnnnnnnnnnnnnnnnnnnnnnnnnnnnnnnnnnnnnnnnnnnnnnnnnnnnnnnnnnnnnnnnnnnnnnnnnnnnnnnnnnnnnnnnnnnnnnnnnnnnnnnnnnnnnnnnnnnnnnnnnnnnnnnnnnnnnnnnnnnnnnnnnnnnnnnnnnnnnnnnnnnnnnnnnnnnnnnnnnnnnnnnnnnnnnnnnnnnnnnnnnnnnnnnnnnnnnnnnnnnnnnnnnnnnnnnnnnnnnnnnnnnnnnnnnnnnnnnnnnnnnnnnnnnnnnnnnnnnnnnnnnnnnnnnnnnnnnnnnnnnnnnnnnnnnnnnnnnnnnnnnnnnnnnnnnnnnnnnnnnnnnnnnnnnnnnnnnnnnnnnnnnnnnnnnnnnnnnnnnnnnnnnnnnnnnnnnnnnnnnnnnnnnnnnnnnnnnnnnnnnnnnnnnnnnnnnnnnnnnnnnnnnnnnnnnnnnnnnnnnnnnnnnnnnnnnnnnnnnnnnnnnnnnnnnnnnnnnnnnnnnnnnnnnnnnnnnnnnnnnnnnnnnnnnnnnnnngagattacttttataacctagaaattataagtaggtaactgtaattaaatgtataaacttagtagggtaggccctccctctatatattatttttaaaggtaaggtcttctttaaatcatggtttaaaggccttcctagtaactagcgctttaaagttagtctaaatagatagatattagataaaataggcctttattagttataaaagctctttattctaactacttcttcttatataaagggagtatattaacttttagtactcgatagctatagaagttatttaaccctaaaattcgataagatttataagaaaaataagattatattaatttatatactactatatttatcttaccttttataatcctttaatattagttattttataatagtaaaacggttatatagctaattagttaagataaaaatatagactaggattaattatattaataaacttaagttcttagaagtatacccctctatataaattaaagctttaaaattagagataattaaaaatagcttcttagtagctagtttaataccttttttacctaattaggtacttttaaagctaaatatctagctttaaatacctaccccctctctaagctagggtagtgacttaagctagaattttatactaaaaatccctactactaggaaagatctatgttaatnnnnnnnnnnnnnnnnnnnnnnnnnnnnnnnnnnnnnnnnnnnnnnnnnnnnnnnnnnnnnnnnnnnnnnnnnnnnnnnnnnnnnnnnnnnnnnnnnnnnnnnnnnnnnnnnnnnnnnnnnnnnnnnnnnnnnnnnnnnnnnnnnnnnnnnnnnnnnnnnnnnnnnnnnnnnnnnnnnnnnnnnnnnnnnnnnnnnnnnnnnnnnnnnnnnngagactggatttgcaataggattaactgtaacggtaaaggttataataagaagtgaatactacggtcggagattacttttataacccggaaatcgcgagtgggtgactgcaattaaatgtataaactcggcaggatgggccctccctctgtgtattatttttaaaggtaaggtcttccttaaatcatggtttaaaggccttcctagcgactagcgctttgaagttagtctaaatgggtagatatcagatgaaataggccttcgttggctgtaaaagctctttattctaactacttcttcttgtataaagggagtatatcgacttttggtactcgatggccatggaagccatttaaccctaaaattcgatgagatttgtgagaaaaataagattataccaatttgtatgccactgcatttatcttaccttttacaacccctcgatatcggttgttttgcggtggtaaaacggtcgtacggccggttggttgagataaaaatgcggactgggattaaccatattgataaacttgagttcttagaagcatatccctctgtacgaattgaagctttaaaattggagacaattaaaaatagcttcttagcagctggtttaatacctttttcacctaatcgggtactttcaaaactcaatattcatcttcgaataccaaccccccctcccagcaggggtagcgattcaagccggaattttaccccaaaaaccccttttaatggcaaagatctacgtcgataggcttcgtcaatcaaagctttacttcgtacccaatctcgaagcctaataagcccttctaagtgtgcattagatcaacttgtcaaaggctgctagattgcaatgcatagtgctattctactagcaaaagaaaacaaggatttacgggatgaaaatgagaataagaagcaaaagcgggctagatctagacggcagatacctgccgaagaaggcctctcagttcaagaagcttctgaaataattgctagactggtggaagcatcagaaacacccctatatcccccggacggaagcactcaatcagggttggaaccacgaccacgggctgcaccaaggtgtagtgggtgtggaaagatagggcataagatcaataggtgttcagataaatgatcctttttagtttaattaatttaatggcgttttggttgaaatatattccttagaaaactatactcttgggtagggtggcggctcgcttacagtggcggctcgcttaccgattacgttagctagttattatgtcaaggatgacttgacgttatcaactaattagtcatagttaattttgccaacgcaatggccagctaacatcgcaaacgatcgagacaacgcaatggccagctaacatcgcaaacgatcgagacaccaagagtttggttgttgaattaaaatcagtgatacgcagtgcatatccaggaaccttggaaggtaatggcgtccaccgtaagttgtaaaatatagaaaatccaatgtgatgttatcgtacaaggcagattatagcaaaagaaaagaaatgccgtcaaagacgacaggatatctagccaaaagtagagaaaatcaatcaaaatgggcatgctctcccaccgcagccgaaaacaacccgaaaatgctttatagcttcatgccaaacatgccgtgaacacgcaaactctggcgcatactcaaatcaagcataatctcctcgctaccaccggggatagcataggcacgcacatcacggtacagtctctcgatcttaccgccctgaccgccgcggctgtaacttaaaccaccaaagatctgactagcctcgcgagcgcagaactcaaagcattgcgttgactgcgccttcaatccagcaatggcaccgccgagcttgagcatagcctcggtctcctccatagactgacactggaagatgatgttctcaagccagttgtaggtggcctcgatctggcgagccatatgggcgagtttcatgcgaataaccgggtggtcgatgagacgcttgccgaaggttttgcgcttatgtgcgtatttcatggactcctcatagcagacgcgcgagaagcgcacgcactggatcacaatgccgatacgctcgtgattgaagtttgtcatgataaccttgaagccctggttctccttgccgatcaggttctccacgggaaccttgacatcctcgaatgtgacataggtcgtaccgctagaccacacaccctggcagtccatgcgtcgggtgctaacgccaccggcttcacgctctataagcagcacgctgaggccgttcatgccatccttgccggtgcgcacagcggtcgtgaaataatcagcgtagataccgttggtgatccacttcttctcgccgttgacaatgtagtgcttgccgtcctcggtgagcttggcctcgcaacccaagtttgcgacgtcactacccgcatcgggctcggtgatggcgaggcaaatgcgcttgtcgccggccaagatacccggcaggattcggtcgacgaggggcttcttgccgaacttgaccaatggcgggcagccaattccgtagccaccgatcaggttccacaccagaccaccgctgccgacacgcgacagctcgtcggtcagaagcatctcgtggaacaaatcccaccggtctgctgacacagacttcacgcggtatggggtgtgcttctgggggaaatggacacccagcagtccagccaggtagccccgctcgcccatctgcttgtagatgtgagcgggcacttccttggcctcgtcccattcggtcacatatggctcgatctcggactcgacccactggcggacctcgtctcgcagtgcggcatgggattcactgaagtagggggatgcatactatgagcgccatatagattagcttcggtgcaaccgtaaaaggcacagatcgatgatatagagcgaaagcaagacttacaccttggtaccacgaggggtcggcgaatgggatcaactctccataagggtcctggggagcgccgatggcaggtggtgtcacggaagactcagaaatggtaggtttcggctcgggggcagcctttttcggggttggcgctggtgccgggggtgccgagggtgccgagggtgccggtgccgtcttctttgtatccaacgaaccgatctgcagctgacccttgtacttcttcagaatgccctcgttgtggtatttccagaactgtttcgaagcgtcctttcccgcaactcgctggagaactagatatacactgtcaacgtgaattcatcggacgtagcggatgctctcggaccaacgtactcttctttccacctgttcagaacaagaagtgttaacatgtgattccctgcatttgcacacatgagttcacttaccagggtgctcatcttggaacttggaaacatcgtagacatcttcatcgataatgacccagggactgtcacccttgctatgcgaggcgacatcctctttgctaaatgtctttgccatggcgatggggggaggagatttgaggaatgaaagaaaaaaaaaaggcgtacaacaaatatttatactaagaccaagcaataaccatttgggagaaagaagagattttcaagtccggggaagctggggaatatatgagttctcagacgaggtatggggcaagaaacaaattccgccaagttcgggcgatattccaagtcaggacatgacgatgcaccaaaaggggcctcggaccgtgatagtaccagttcacatgcctccacacagagtcgaccttgggatcttacgttgtagcagtcgatgtttcattggttgccgatcatttcggtcatcgccgttgacagacagtttattggctcgtgctgcgtcataaatggaaatgccgaggcataacagttctctggtctgggtgcagtggatggctgagtcagccgagaccgggcatgtgagcatgtgaatgatgagcatgtaaacaggacggagtctgccaatattgatatctcgatagttatatgatgtaactgtcattatagtcacttgatacaattgattagttccggttcatagtttcgtcactatgtacccccggcatgtgcatgttctactacgaaaccatcaagcggtgccccggctgcggtcgagtgcatataatacgacaagaaagatggccaatttaaaagtaacataggaactttcatatcaatcacagtgacggaaagctatactagcccccaaatagatcacgtcggcgtagacagcctgattagtctagtaatacatccagcatcgagattctatgccgcaaaaacactctactgcccctcaccgtctgactcgtatgagaaatccctaggaacaggtgcatcctctacgccttcttcgtcctcatccaccgccgtcagaacaccggcagcagcggcagcaccgcctgacgtggctgcggatagagcagcccgagcaccagcccgttgaggcgtctggagagcagcggttccaattgcggcctgcagacggtcttggagggtttcggtcggaggaggcggttggcgagcctctttgctggccttcaattcaatgacctcgcgaggctcgtcaggttgcttgtcgagaacaacgacaacaccaccagtgggctggagttttgttagcattggattcattagcacaaataagaatgaacataccctcttgaccggttcataccgcgggtcagggaaagtgagatacttgagctgagctggtagtacccttgacaggttgtccagctcgtacccgaccttctcccgctctgccttcttcttctgcacatctgcagcaaccttctctgtctccttgccttcttctccctcctctttaggagcatcatctgtgtccattgtgtccagcagctgatcagtagccttgggtgttgtgggcgcttggtcaatgtccatgctctcacggcgtgcctgcttctcccgacgctgcgcgcgacgcttggcctgggcagtggtagaaagaacagcagtcttgaccttctctggggcctcctcggtcttcacttgttgctcaggggggtagtcgaagagactggggcgggtgttgctgtggaacttgaagtgtgggacttcgagcttctggtcgacaccgattacggatgttggcgtgaagctaagcgacaagaagtgtgtgagagggaaccagtaccagtactgcacgaagaccgcaacacccacgataccaggcatattaaggttacccgtctgcgtctgcaggctaatagtgcagtttcggccaccagcgtcaatgataccgagagcgatggcacaaccaaacttagccatagcatcctcgtggcggtcaccaagcatcttcatcatggccttgcgaaggctggtaacacgagggttcatggcctcgttctgctggacgagaaccatggcaagagagatcagagcaccttgacgaacaaagtcggtagagtccttgagcataggctccaggaggtcgatagcttcgtctaatccggtgccggcgcaggagataccgagcgccatggcggcaccgtatcggacgtgagggttgtatgactcggaaagcagctccaccatacgaggaacactctggtgcttgcggaacaagatgaatcccaagctgagcacagcaactcggcgcacatcgtcattaacatcactgacagcgacatgcagaagcttacgaactgccttgttgctgccagtgccacagtaagctagggcaatggtcatgataccaccgtagcgcagagttgggtcggggtccccgagaaggccgttgatgagctcgtcggcagcttcctggcgtccgaacatgatcaaagccatacccatagctagaccacgaacaatcttctcgtgctgtgtctcgtgtgcgtactggatcatgtcctcaagagccttcatgttaccggtaccaagcatgatgagacccatggcgagaccgacagcctcgccattgagagcggaatcggtgtaaagaacgctccgcaggtcatcgtaaatgccttcgtcgcctgtcgccatacccgcaacaccgagaccaagagcaccaccatgctgaaccacctcttccgtggccttcttgaaatggtcacgaatgatgtcaactgccatcccgccgtggttggcgtagatgagaccaaaggcgtaaagggaaccaccttggctgtagacagaccctgagcccccaactccagcaatgtgttcccggggcaggtaaggctgtaggagcttctgaccttggctgaggttgccgcggtgaatacagcccaatgcagcagtggctgtgaacttcgaccaatttacggccttgcccagccactccaggttatcacggaagaacttatcgtgagtagttcctgcatgcatgaacgcatttgaaagtgtcacagcggtgtggaagatagaattgcgagcctcaaggctgtcacgaatcttgttcagaatcgcgatgtcagccttgttgttccggtataagaattccagattcagctggatggtcttgattccatcaaggatcgaaagaatgttcttgaatgcagtcgccgctgcctctggtagttctacatgtttatccgagggccgggaagagctcccctggtcttcgagtaatgcgtcagactctgttggctcgctgtcctcttcattattcttttccgcctcgtcttcagggacaagttcagcaatctcttgccgaaccttctgaaggaactcctgagtgctgttgtcgtaaaggtcgaaagaaatttgataggcaacggcgagagatcgcgcatctcccttctcaacgagctggcgaagaatagcagaggccatggagtgttcattaagatagacaacacatttagcgattgagaagaagtcgggtgccgggatttcattaagaagttccaaaattagtttgaggatctagaaaatgaaaccttggttagccgactcagctaaaatggtagatatatttggtgaacgaacctcgctgcggaacgctcgttcttggacaatgcccatgcagatatccaggacatattccatgagctcctcgctaccatgggagtcaccatcttcctgcttttcgtcgctactggcgcgaaggatggccatgcggagcacatccaagttctttgcctcgatggcgattccaatgacttgacggtatcgcttctgtctgaagcatgcttcaaacaattgctcaatgacggtctgcagttgtccctggacaccacgcttcaacacgagagagttttcctcgtgctgaacgctagtgtcatcgccaccagggtgtgcggcgtccacaccgggaacctccgcgcgagaaagtaacgatttggaagggagtgcggatttggaaaaaggtgtaataggagaagtgaggctggcggatgtgctggtggcaccgtcgcctgatgctgggaatgcagtgtttagattggctggttggtcacccgcgataggccgttgagcggcagatagagagacaaaggtatcgacacatttagctacatggcaaaacatgttagtatcaaagagagacatgctgtggatcttcttcaacataccgataatggtctcctcatactctccgccgttttccaacttgaacagctttccagcacctagagcaagaaccatactctcgttatattcctgcagatgataatataccttcgatgcgactagtgctgcaaggccgcgttccggaaatgattcatcttcgtaaagagcctcactagatagatagtcagcaggggcctagtagccagtcagactcgggagaaatgacgcaaaaaccgagataatgcttattctcacgagtctagtcaaaacaaactcacatttcaggaactgcgttgacaacctctgtccagagatgatcgatttgagaatctaatgtcctcaaagcaaagaccttgagctctgggtcaggctcggagaggaagccaaccaaaccggcggccgatacgagtccgaccatctttattgagagaggattcgcgtcgcgagtttctggacggaatttgaggagtgataagtgtattgttgctgttgtgatgaagcaacgtcaatcgggagagagcttagaacagcaaatcagccccagcgcagagcaaggtgtcaagggagatttagtcaccccaaataatgagaatatgacaagaaagacggaatttgattaaatgaaagagacgaaatggatgaagtgcacatacgaatggaagctgggagcagttgtcagaagctttgctggcgcgagagcaacgtcaacgcctgagcggagctgactgtacatgacgggtcacgtggacggcgctcggtcagctgcgagctgcctgagtccgcggtaaacagcccatcacctatcgagtggactatttctttctgatccgatcttagattaaaaccgctaaatagtcttcctacgccggattgccgcgagaaagctctagccatccctccggtcgaagcttggccatcctccacggtccttcctctgtcatgtcgacgcttcttcaacaatctttcgatagtaagaggctgccgccagttccggctcgaatttcaatgttttaccatgaccctcttttacatgttgaacgtcaggcaaaacacatacaacgcaatctccaactcctgatcgatgctcaaagcgaaggccttctctccgggctgcaagcggacgatagctcgaccggaaattcgaccccaaaattgtcgtctagtgcggcccgatcacaatccccttccacggtgcctgctaggcagcccacgcctaagaaaatcgggcttcgggctgcccgggagggcatatttcaatcaatatatgatctactgaagttgcgggaagaagaacgagagattctgatatctcagaccaatgaaagagagaacgcgctacatgatatccaaagtttcctctcaagaaggaatggtctggaagacgctatcactactatacatggagacgaggagagccgacgttcaaagcagctagaacaagaggctcggaatctcgagactgacattcatgaattggagaccaggctgtatgagatgaaagctaaacatcggcatctcgcgaacgagatatcacatattaacaactcggtcgatgccaagctctcttcttatactcaatctttgtctttactcgactccgacatccgaaactacctccgtgaccctcctatccaaccgttatcgcaaagctcaggcgaatctacctttcactctttgaatcccaaacgtcgcacacttgacatggcccaggagcattggaacacagaacaagtcggtttgcacagtaggcaacagcaagtggatgcggaaatactggcactagaagaaggaggcggaatatggaaacaagtggtgtccgctgttacaagcttcgagaagcgcttgcaagccaacatgcggcattatgttgagatgaccacaccaacaggttataaagacgggctggtgagaagtattctggatgacttaaagagtaccactcaccgggtcgaatcacatctggagctcgctgaggataaggattggaagctattagtttgctgcattgcagcggagctagaggccctgcgagaggcaaggggcttgcttcttcccgccttcggcctcccggtgcatgaagatgatgcacccctgaattccatatccgccaaagatcctctaatacaccacgagttggaggtcgaacatgaggacacccgtccggatcagctggaaaatgacgacccagaacctccagccgatctgctcaaggatgcagaccctaatcattccgatgccaggtcggaagatgatgagccagatccgtcatggctaacttgatcaggatctctagtactattaaatgaagcagagctcattgcatgatttacacagcatcttccagccaactgcatcttttcgtcttataaatttatttctagtgttgtcatctcatatcgataaattggattgttacattatatgcccgtatctcgcatacttgtacttgacgatgtgtaaattgtgtctagttggtcttccgaattattagggtgggcggatcagcgaaacctcgcccctcgacctcttcctgcatagcacagcacaccgtaagctttgcattctaaaaacaaagcaatatgaaataaactagacctggtcatggatcttccaacagcaagcttctcctttgtccttccatctgtttacgatggcaacaaactcgaatgccgcatttacctcccgcccgcgctcaaaaatatagaatcaccaacaacctggtccaaccgcggtgccattgtcgcgcacccatacgcaactctaggaggatgctacgatgatccagtcgtcgatttcattggcagtgagcttatacaagctggctgcatcctgggaaccttcaactttcggtataatcattcattgaacactccgccacgacaaagttgctaacgaataacaaatagtggagcgggtaactcccaaggacgaacaagctggactgcaaagcccgagcttggtgactatgtgtcgttctacgggttcatgttgcaatatctgcactttctcaagctcgtattggcatcgagggaacaagtcgacccttcaaagcctcaaaaagccatcgacggagtaggaaatagctcagatatttgtcttatccttggtggatattcatatgggtctttgattgcgtcacatgtaccgaccctcgataccatgctcggccttttccaattcacgccaacgacaacctctacaaatagagccacacccatacacgagattagaaacacagcaaaacggatagccgcattgtccctggagagacttcaaataagtcacagtctggccgacgatccagacctcggtgcattgacaacatctatctcctatcttctcgtgtctccgcttttgcccccgattagccaattcctgacagcattctcgactttatcgctgaatctcaaaacagagacccctaacggcccccacatcccctgcccgcgtccagcagatcagcagagcacgcataatactctggcgctgtttggggaccaggataccttcacatctactgggaaactgcagagatggtcagataaaatggtgaatatggaacgcagtaagttccagtttcggatgattgatggcgcgggccacttctggcgtgagaatggagtcgaggtgcgagcaagacatgcactgaaagagtggctctgtcagatatgataatcttgtactgttggttatttggctgttcaattatgctcaatatggtgcggcaatgataacaacctgacctcgagaccaagtgtcagactgggatatggccccaaacaggaaccttggcttttgttacatgactctctactatgatagttccaatgcccattcttccaggtattgggatcatcatatgcacatgagtgacttttcttttatatgcaaattgattggaagtcgctcttcctctaatttagcgtattgctgatatcggtacagtactgaagcgagctccgacacgcacgtagatgtatgaggttttgactatattaatccgccgtacgaccaagtagtaactatagttacccctacaggatagaatggttagaataagagagtggataactacatcatttctagaccatcaaagtcggcttataagtacccaaatcaagccccattatctcgatgcaaaaattctcaattcttcacataggatgtcaatgtttacatctactcaaccttctttgatgctgctcggactcctccattcacatcaacatgcacccctcgcaaaacatacccatctcgctgcgcctcatcccactgttgccgtattaggtctgaccgagctgtggaacgctctaaaatccgtaccgagtactccttcggcactcggatcgcgccctccataaaaccttcgtcgctgatatccaagggaacctcgtttcccttatcacctaacggcaaacggaattcataggcccagatgagattggacaccgccaagaagagcccattctcagccaagtgaatccccgggcaaatacgacggccagcgccaaaggtaaaatggtcgcgggcgaagatatcaccacctgcggcatacaccgcagaacgttgcgggtgattaaggtagcgctcaggtctgaagccaaagggatctgggaagcgttcatggtcccagtgcagagcattcagattagcgaggagaatggtacccttaggaatctgatggtcgcggtagtgtacgtccccatccgccatgcgccgaagccccgtagtagcgaccggacatagccgcagagtctctttgataacagccttgatgtagggcatttccggctcatcggccagggtcgccatccgcccatcacccaggacccgcgtcacctcctcaaatgcccgtgcctgtgcctctgggaacattgccaggtaccggatcatgccattcaacgcgctggcggtcgtctcagctcccgcttcggggacagcactggctaaccatgagatactctcctcctctagaccatattcgcggtagtttgactccatgaggtccttggcaaaacactctggggcattatctgcggcgatacgttccttcagattgttccagtgcctcattttgttgccgtgcatcttttcagccatgaacttggcctttggccacgaggggaacaagaaccgcggcagccagttcagaggtgggaatacatcaatccagaagactccaggactcagaatgatagacagcattcgcatgttgccgtagacgtcgcggacttcctggcagtcccacttggggattcggagcccgtatgccgatgtcatgactatggaaaaggtcatgcggcggatatgtctgtagaagtcggtgctattgcgcccctcattgttcgcttcatggctgagatcccagaggagttgcttgatttcaaactcctggcttgggatgaatgctgcggatgccttggcgttgaggagctgtttcagaaacgcgtgaagccgcttccattttgtactgtaagtcatgggcagcacaccctcacccctcaggcagaactcttgtgcgatgggcaggggcggtttgccggatgtgacggcggcctatgtgccaattagcatctagttctgcttcttgtgctgttgggaaggatgcaagtgtttggggatggaattacctgtctatcaaatacttccttgactgcatctgggctgttaaagaacacccagttataccaacctacgcgaaccttgaatgtatccccatactgcgccgcccagcggctcaacagctgccgaggccgggcgggcaggtccagcccaatgccaaccaatggccagcccgagggaccgggtatattggcaagaggcttggtagtcttgcgagagtaccggactgtccaaagtagtagttggaagagtaagaatgcgcaggcaaagccaaacagtacagttggcctggaaattgcggagacaaagcgaggggaaagaagcagttccacagcatcagtcttgtaaaaatccattgcgatggtttttataactccttacagtgggttgattgaagaagtaggagaaaattggatcaaagtccaagattcctaggagttcctagagtatccttttatgtccttaataacgtgagcactgtagcacttacttcaccaaaccccacaaattcatgagttttctcgtgaatttcaactttacttgtccaagcacgaaagcatcatcaaccaaatggaggatcatgtccgttgggaatacggccctcctccgccctttgacaaatccccgagcattactgacgacgtattttccgctccatattcctgcatgtgcatagtgcttgctttagctttcagagagccagtccaattagcccgaagaaagcaggacatcaaccaaatcgaggcttatgtccgttaggaatcccgcttacttctcacccttcctatatccacgagaattgatgacgacttactttctactccatatccatacatatgcatatcggcctctccgtcgttgaggtggttgacccactccaacagggaagaaatgctatccatctaatcaagaaatgtccgttagaattacggctccatctgcccgcccatatattcacggaccttactccgtaccaacgaattatattctgctccaaatctctatgtatgcatatctagcctttccgaagctgacgtggctagtcaaaggtaggtgaaaaatccgtatgatcacttagagacacttgggatatactaatgcataaagtagcttccacctcgaatattaacggctcagaaaagcataacgggtatcatgaagaagtagatgtacatttagtgggtagtatacctcatatacctcatatttatgagtaaacaatgaattataattgtgtaatatctagattctgtgttctagattcaagcggaaggcatgcatcccaattagggttaggtgaagccgatgacgtcactcttttgatatacggtaagggtccagtccagggtcatgtacggtatggtacgggtatggaatcgttctgaaatttataccgcgtgtattgttaggttataaaccaaatgtatgcaagcgttgtacttcgcataagcacgaatgcaactccactgatagacacgcggccgttccctagtcgtcccgttaaactggggatggaacctatattttaaaatctgttaacgaagaaccccgagcactcaaacgggtttatcgtgacgccaaatcgccataattggtacgaggagaaacgcagctcccactatcattgccattccactgaagatctgcaatccaaggaagccgttatctcccccatggccctcaataagacctgcgatcggcgctccaatcagcacccccagactagtggcaaaccactgcatacccatgcgcgtcccaataaccgagggtgttggtgagacgatgggatgagcgatgaccaatgggttggcggagattaataccccggagaagatgccaaaaaggacacagaatacgatgaaagcggggatagagtggatacctgtccagccgaagaggatcacggctgaggcgaggacgctagtgagcagaacagtgctggcgcccagatgaggggtgagcaaggaggagccgatacgaccgaaggcggagcccgcgttgagaattgaaaccatgtagaaactcagctcggtggaggtgtgcagggcaaccgaggcaaaggtgggcaagtagaagagcgggatgaagtaggccataaacatgaaaaaattggcgaccgcgtaggcattgaagctccattcccgaaaggcatgccagtggatgagccgtcgaggggcaccatggcgagctttggtggtggccattagaagggggatggcgatgcacgagcaggccagctggatgaagcccatagcacgcactgtccacggaaatccaattgacggctgaagtcggataaagatgacggggaagataaccccacctagattgtgtcgatgtcagatttggtcctggtaatcggaacgaagaaaaacgaagagtagaagggtcaaatgaccgtaccaacactggcgccggaggtgactagtccaacagcaataccgcgtcgcgtagtaaagagggtggaaaccagagaaaggctaggcacgtagatcagaccactgcctaagcccacacacactccttgcgaaagcatcacttggtaatattcggtggacaaactcagcatcatgagccctagtgtagtcaagaagcaaccggcgatcatcagatgatgcaagtatccacgatcgaacaggggaccggcaatagccccagtggaaatgagtagaaaggcactgacggtgccgacccaggcgattcgggacggagagctgtcgcgcaacaggtcggattggtagtagctttgaaaggcaccaaacgcagtcgagaatccccatgtggtgacgaacagaagaaatgaagcaaatacgcccgaccaggcggccaggccaccatttggcggcgcagcgggaagactagactcctgcgtaggtccattggcccccatagcgattgatagccaatttcgtgttttttgagatgcggagataaagataaagagaaaagaaacagtgaattatccaacatatttaaatacccagcccgccccttttcctcgcaggtcggagaatcccccaggcgccagattcggaaaagcaacaaagaaaaaagtcccccgaatttgtcatcatgcagtatgtggacatccttgtcacctgcaagtcacataccgagggccgagcattaatatcttttgcaggtctgtaatgccatctacgcgtttgtgtgcaaacacttggctctccaatcccgagaaggctattcctggccaattgattattatctgtacctggcttggggcttcacccaagcatgtcggaaaatacaccgacctctatcggtctattgcaccacacgcccggattttgttgatcgagtctgatgtctcgatattggtgagcagctacgcacgccaacgtcgccggatccgacctgtggtagacatcgtcctggagactttagcagagacagaaaccagctctgacgacaacgcaccgcgaatcctactgcataccttctcaaatggaggtaccaacaccgcaacccaacttctgatcatactccgtgaggtcgcctccaagccgctaccattgatagggctggttctggacagtacgcctgccaaggggacatactggaagtcgtacaatgcaatggtcttctcccttcctcccgcgtctcgattcgtgggctcaatggtagtccactgtctattggtactactgtacacctggatagcatgtggaaacgaaaacccagcgagtctgatgcgtcgtaccctcctggacaaggatactgtcggccctgcgcctcagagacccgaccccgaagctaggggatacatatattacatgtactcgaaagaggatcgtctgactgactggatggatgtctgggaacatgcagggaaggctagggaggaggggtggaaggtcaaagaggtcgtctttaaaggcaccggccattgtgcacacatgccctttgatccgatgcggtatacggagtgtgtagagcaggcatggggtgcaatcagcaagcctgagtccaagctgtagttgacttgctgacctatttttgatcgtgtcttccttatatctatgaagcagaggtgggaatttgtggaaatatcaagatggttcaaattgcagccacagctcatttattgaagactcccaattttcactaagagaccacaatcttactccattctacacacacaagtagtaaggaatcttcctcggatcaatcgaacgccagataaaaggcataccctgcgataaaccatcctcgtcgaattgccttgtccggatttcttcactgatagctaacatcgtcgcccgaaacttcccctcggcagcatgaagatcgcttccagccgggcctaagaattcggtctcccagaacatatgcggaaggtttcctttctgctcatccaacaatggtcggttgaacctgacgaggagcgaagcttgcttcagtgcctcggtctcgttatgcagccacgggatcagcgattcgatgccccctttagtctcaggaagtggctggttgaaggaggagggatgcaacggaagcacacccagggcctccccgacagtcgcaccattgagtgcatgatgcgcaatcccagagaggaatgccatgtgggagagaatcgagacaagatcctcgcgcgcgaataatggggcagggaaaaagtcaatgacttgagcctcactggtggcctccatgatccaggcttgtagttcgtggtcgctgcccatcagactgctcttggggtaggaatattccacgaaagaacgagtgaagtcttcgatggcttgcaccatgggtgccacagtctcatagaatgggaaggagcggagcggaggcccatacgcgcaatctagaagaccacggtctgcgaaatcccgataaaaattcgtggaccggaagtgacccgcgtgctcccaataggcgtctgttgcgaacttcttgccggcccagtttggaaccgcgaaggagctgtcgtagaaaccgccttcattgaaaaggaattcctcaccaatgggtcgaaccgcatatgcctgatacattactttgaataattagctgcgttgaattttgaaacgccgaagggagagcaacatacagcggtcaaggtatccacggacaggatgccgcgagctcatggttcgcaaggcagcctggtgcacgggctcagcgacatcatgtgtatttgctagatggtatagctgggaatggaagagatcgttcatgccaaaggccattttggcgaaaagccagtcatttgcgtcgtcccgtggcgtatatgtaaggtttttccccatgttagtcttgatagccaatggaaggaaatcgccagatccaggatggatatagaaatacgcggtacaagcggctgtccagcgcccaggagtcttggggtaaggggcttgataggaatggtcagcatagaagagacgtccttcctggtgtagatccgccagtgttcgaccctcagccaggtgttgcaccaccccatcttctactggaaaagggagactgccaattctgggatgtaggcgtcgaaccacgtagggattagtagaaagcctctccatggagaaaagcagatcttgggtccagttggtcagcatcccgggggatacaccgtccgggagtgaggaggcccattgatctttgtaaagaatctcatagctggagagtgattgtatgccccccaccttatatgattagctagggcccattttagacaaagggacttctgccggcataccttaatcagtgctgcagcggccttgtccaactcaaggtagacgttgttggtgacatattccacatctttgaaccacgcaaccctgtctcgggctaccattgcttctcccagaaccccggtagggaagaaggatgtgtttccgagtaaagggggcccatagatatatcctactcgagctagacgaatctcgtctactctttcccaggacctagtgtcaaacattggaaggctgtacttaggaccattgtcgtcgggaagtgcagcgaaaggtttcagaaccgactgaacggaaataattggccaagcaacagcattgccaatatagaggaatgatagcaaaagcttataaatagggaagagtgtcattttatatagagaatcaatgtcgttgtcggaaaagaaagcaggaacttgacatttttgatgggaatcaccgacatctatattcattccttgacttgaacgtaagtccccccctcacaatcagccccagtgaaactcatgccttctattttctgacattctacatatctccgctctcgtgaacggccgtgtttactccgatctatgacgaattaccagtgtgggcccagctggacgactcaacatctagcagtcctccaccgtccaaattaaatgcatgatgctgtaagtaagctttctgattattacgaggtcaaatatatttgcccaattgagccgtctgtctgaacaagataaagaaaaatgaatttttattcccgtacattatctaccctgccagccatgcacacaatgcacaaggtaaggcaaggttcctaatagagtcccttccccgatacactagaatgttgtcatttaaatcaagggtaattacaagaatgggtgcatgtctccttgaacaaacgtagattgctctctcattgattctcccatctaatcaccaaaacaatgaatcttgtcgccattatctgtttgtggcttaccgttgtctactgctatcccggcggatttgactgggaccaagctgctagatatcaccagcagcaagtccttcgtgatgacaatgaccgaggatttggcttgaacgagccgtttgtcccaattcccgctcatattctccctgagaagcagccctttatcattgacggatctattcatttctacgaaaagcatctcaatggctccggcccagacgggagctaccgtcgctcatcttgtccggccgtgaattcgttggcaaaccgcggatatatcaatcggtccggaagaaatatcacttatgctgagctagcgcacgcagttcgccgagtgtggaacttcggggatgataatgtgaaaacctctttccctcaaaatcaaagtataattcgcattcgtactcctgctgacttgtgggggtagagtatgttagtgctggcgccaacttttgcaatgcatggatggcctgaaacgattgatttggattacttcaatgcatgatacccatagctccccctggttccctcgtgctagacactaataagtattcctaggatgaccatgttcaatacgtgattaattgcccggccgcaccaacccgcaatgaccgcgcagtgggtgacaacattaacatcaacatgactctcttcgattccctgttgtccttctccaaggatggtgaaaccttgtccctagaggatatggcggagcaccatcacctacgccacaaccaaagtaaaatcgagaacccggacttcatctttggcaatcaaggagcaatttgctcactgtaagtattaggtagtggccaatactccctaactaccctaggcctaatattcaagacatacgttctgacaaaggcagtgcccaatacacaaatatggtcggggttctcggcaagtttggtaaacatggccgaactaccctattcattgacgatgtcaagactttctatcttgacgaggacattcctcggaactatgagcgcagagaagcacccgtgagttatactatgcttgtgcccttgtaaatagtatccttactaaaagacatgacagcattattctcccgagtcaaatgcaatgattgaccgcatggcgcatcatgttggctacactattcaacgaccgttcccggagggggatcagaatcccggtgtggacatttgtccgatgaaggcgcgattccagcacgaggattgtagctagaattgacaataatctctcatgatggtctggaagggatgaaaaactatagcaagcagatcagattgtggagtatattgatgtggcgaatgaatgagcggattattgtgctgtatacacacacctatgaggaaactttggcccagtctagagtaattgtccgagcacagcctggcttacacctataatattattagataggaggataacttgacactaggtacccatgcatgaagcttctaggaatatagtttctatgcgcgacagatggggcgatcgtagtcccggagggttaaacggtcctttctacataaggaccatgcaaaacaacgagaatgttccgaataagattatggtaactaggtatgcatgtcatcttttagtaaggtagcatacgaaaacatagcgcatctaggccctaaacatccagtggtaaaatgtcttatcttcttcccacataatacatcgaaaagcagggatcactacttagcgtacgagtacggtatgacaatcttacattcactgcagagtagcatcaaatgggcgcaattgcggatgcccgaagtgggccctgcatgagtggacgacatgcagggtaattatcttgattagaggacacctatagggaagtgtagttttgatccggcatgcaaggcgtcctctcattgttaatgataagtatgcaatttcacataaaaaatctcaatttcttgtctaagttgcgggctagaggctggatacagaaattatcgtgctcaagagtcaaatttcgatgatgttctgatatgagccagtcatctcgtctatagctttcctttggtaacttcagcgagagttctttgcgtatgcttgtaacaccaggcaggatccgccatatccgcccggatcccgtagttctcctccgcatcctccaacactgccatatccagggtggccacccccattccttcggtggaggtacccaaacggaccaatgggccggcatatggaatcgtgatttgggaaagaccgcagtagttcttgcccggtggtccgcctgcgttggcaaagaccacggcacaggtgttttcgaatgtgcgtgctgtcaaaatgctgtccagaaacagggacggcgcggacgggttttgccgacggcccgcctcggatgcaccgctgcgggtccacagagtgggaacaataataatcttcgcaccgttggacgtgagctcccgccatgcctcggggaaggccaagtcccagcaaactagcagaccgaccggacctaggggggtttggatgacctggtgggggctgtcgccggaagagcgaaggtaagctcgctcagttgggccccacagattttttttaatgtatgagcctagtatctccccagtattggagatgaagaaggtagcattttccaaaatgggtgtcgtgggtctctggtcggacttgtttatctctgtgacgtgtgctgaagatgcagatacgggtcggacgatggacccagggacgatgcagatattacattctttcgctaaggcctgatatcgatgcaaatagacctcccaatcctcacacaacgaggcaaagcgggggtctgtggggatccagttcgtcaagtgaaattcaggcaggacagcgagttgacatccctgagctgcagcctcacgaatgaagtttacagcgcgagcgaagttatcctcgggcctgaggggctagaaggtcatgtgtcagacactgaaataataatatggttgtcttgcattttccatttctgaagaattgtggatgtaatcttgccttaacatacagctgtattacagcaatcttgcaaaatggcggcatgatggttacaaaaagaatcaaaatgatcaagaactaaaagaaataacgaaatccaaggggcgagatagggttgcaaggatacccgtcttctttccaaaggttgcgaatttggatttgtcagaagtgggcccccggatattccgttacgggtactccgggcgggtactccgcatagccccgcgtttcaaatggtacttttgtattcggtttctgttaccgtccggtatgtaatgtatcatacctctttagtaaataccagtaagcaatctcacagatccagttctcaaataccgggaagggccgccgccatgccgatatagatctcaattccatattggccatgcatgcactttcaattccccgtttaggttgcatcaccgacgtacatatgttgaatccgtttgtttgactttttttcttatcttcatttctccccttgctttttactaaaagccttggtcatgatgcatgagtaactctatacaggtttctaggtggatttcgggagttgctttggatataatgacggaatatagtggattgaaggcattcttgctcaccttggaataactcttgcgccgacgaaactgataagatttctcatatagcttacttatacgcagtgattgaccttgctctgtgggtgtcaccgtgcacatccttcctcgagttcaaagttcaaaagtcccagctcattatcatcatgtcttctctccgtctagcaatgaccagtctgttaaccgggttgcgcccagaggtggtggaaaaacttcagtcggacaagactggctttcctcaaaagcaacatgtcttccatgcatccgacgttcctaaatggatgcaatgggacccgtttatccaacgaggataccgaacccagctgaatagtttcaagcggtgtttctggtccctattctatctacataatgaatcaatcaacacctggtcacacgtccttgcaggaatttatttcctcgccgttcttctcgccaccgactattggatcgcccaactgggactcaaagtgccattatcagacatacttgctattcagacgtatgttgccggcactgcagggtgtctcatattctccgtcagtctctccgttaatcaatcctttttacaaaatccagaagtacttaactgatcctcacaattctaggctaccttccacgcaaccaacgctcattcgcctgaagtcgctcatgccttcctcaaactagattacttcggaattgtgctcaccatctcaactacatgtatctcagtcgcttatttcgccctgcacggagaaccgaggctccaatgcgtctacattttcttcactgttctctgcgcagctatggtcttctgtatcacacttgatgtcggtatggatggtacacgtgctggtccatggaggtaagctctagcataatatcttctcatgtgttattgcagcatttcagttcaataacacctgttctttcctcacacagagcaactgtattcacccttcttgcggctagcggcctagcccctatcttccacgtcatctcgagcggttcccctcgcgatttcatccgcatcccttgggagactctcatagtaacctgttcttcatacgcaattggcacagtggcgtatctcttccggtttccagagcggtattggccggcgcaatttgatattatcgtgagtctgattcatgttcataacggaaagaggatggtttgggattaatgagaaatatagggtgctagccatcagatattccatattttggttgcgtttggccaggttgtgcatctgttcggacttcgggatgtgcttgtaggaatccacctagagtcgcatacggtgtaggcactcagtagtaccgtaccatacgtctcaatgaagagaaagtgtgttttagaatgaggtggcagtgaagagctttggtagaatgtaataattcaggaaaacgaacgagttctataaggccaacccggatcagaaaaggatgctgttcatgtcacggatagttagccagatggaaatcaaatgattcgggcatggcaatttcaactatcagtcgggcctgtcaaacttcatgcattccagctaactaaatcaatccatcgcacaaatgtcatcaatagtgtccacgctttgggcaagattcacgaggtcaggtgctcatctttcagcttacgtaattatcaggtgatctgggtgtttacctgattatgtaagactcagggcgtgctcaattttactcagaggagcaaaagcggcaaggaataagcactaaaacgcaaagggaaaggtgatgaccatgcagcaatgcttccccactgtccgagatgaggttgatcgtggggtgagatcatgtcttctgatactatcggttatagaagaaatattgtatatcgcacatcttttcctagagtagtagaataatgtatggcatgtgatagtgaaatcgtcataaaaggaaccaagtggctcaaagggcccgaagaaaatggctaccattggccctcgtgacgtttgttaggtcaccgccaaacttgacttgaatccggggaatctctacttttataactcgtttactggtttcgtttttattataatactttcattccggagctaacagatctccgcatttcacaccccggctgaatggcttgcttctctaatgcacaggcctaccatgtcggtgttgggcgaccccacattagttcagtgccatcatgggcgcaaacactcccaagaatactctttaccccaacccttacctccgcgaccgctctgcaaaacgatctccatcccaaccgtatcgtcgctcgtgaaggattcgtggaattgggccggtgatactctgcacacctaccgtgatggtctctcgaaggaacaacggaaacaaagggcggacatcgaggaccgcaagcaagtcctgtatctgaaaataaagaatgtatgtacatgcggtgtacctgggccgagcgatcgcatctgcagggtgacccctttctaacacttgggctgcaggctgtgtcgtacgaagaatggcgaagttgcgccagtgaactggacgaactagaggataacaacgcttggaagcagacactcgagtgcaccgaatatgatcctcgtttggtacaggatcgtttgcgacagttggaagaggctcgcatcagctgtgatgtaagccggatgttgttcttggtgcgtactgcgctgagtcgggacctggcgcatatgagcaatgcctctctctatcgccattcgcatattggtacaaaggacttgatcgataggtatatcaccacggctttggatactatcgctacgctggtggatctctcggtgcatgatcgctgtgatgggttggagctgaagtatatcctggaccagctcctggcagctcgacaggcatttggtcgcagtgctctccttttctccggtggtgccacttttggcatgacccatatcggggttctcaaggccctctatgaagcaaaaatgattccgcgaattatctcaggtgcctcggctggtagcattgtgtgcgcggtattttgcacgcgcacagacgaagagcttccggcgcttttggatacctatgtacatggggatttcgacgttttcaatgaaaagggccaagaggaaaatatcttgcagaagatgactcgttttttgaagtttggatcattttttgacatatctcacttggcgaagactatcagaaactggctgggggatatgacttttcaggaagcatataaccgcacccgcagaatcctaaatatctgtgtgtcaagtgccggcatgtatgagcttccacggctgttgaactatatttctgctcccaatgtgttgatctggtctgctgtgtaagttcctcctttttcacatcatcaacccatttctaacgtctttcaagcgcggtatcatgctctgttccttttgtctttaggccattcacgttgatggctaaagatccgttgacaggggaaccggtcccctggaatgatcttcacaagcagtatattgatggctcggtcgatggagatttacccatgacacgcttatcggagatgtttaacgtgaatcactttatagtctcccaagtgaacccccatgtggttccattccttccaaaggaaacaggcccacaggatgcgacaaacgacggcccttcgttcattcctcgatggatgaacatgatggcgcaccttgccaaagacgaggttctgcatcggatgaacgtcctctcagaacttggagtctttccaacatcaatgaccaagtttgcctctattgtgaaccagaaatatcatggagacatcaacatatacccagaactcctttcctctaacctcccaaggctcctggagaatcccacaacggagttcatgctttcgtcatgcctgagtggcgagcgggcgacatggccgagactaagccgtatccgaaaccactgcgccattgagctggcactcgataatgcaattcaaaatatgcgggcccgggtggccttcagtccaagtcaggttgatctacgtatgccgcaccgtagtcgtcactcgattgactcggcagacagcaacggaaggggacgttatcgcgacaggcgaagagggtcccacagccccgaatttgaaaagaggcagtcgggtgggcaggaactacgtcggccagatcacgaactgagaaaggaacgaagcactgtttcgttagagaacccgcctctctcgcaatcaagcgagtcaatcttcatgccaacccaaacaaggacccaccgccgtacatcctcagtattcttcagcaatggagggatattcgatattgggtcaagcagcgatgacgagctcgaacgatcatacatgcttcgtcccaaactcgcaggccaccgaacgttctcagagtcatcttcgtttggcagagtagctccgagtcacgggccccgcagccctgtccggtcccgacgatcatcattatcctctaacccggcctataatttctcctccacggctcgtcgcagttccccaaagcaggtttatacgccgtcggctcgcgatttctccgtgaccataccaccttcatcccgccatctgctcagtatgactccaacgccaacactccttccgagctcgcctgagcccctcacgcgcaagcggcagaattgaataatatacaagcaattgtgcagcttacttgatcctttcctttttcgggagtcacaggccgcatactccggattcttgacacgtacgaagtacaagctcgcccctcaaattccccgaatttcgtgtacgatctaggacactcggacaagaaggctttttgattcttgccgattgttataattccgtacacctaccgctaagcatccactacatctcttttcggtcatattccctctctttgtctatcgttgtctccgggttggtggcatctatagaaaggggtgttagtctatgcaacccgatattatcgtactagaccacctcttgcttatcccctttgcatatcgaatctgccggatttgtctgtttcctttctgtttgctatctacaacatatgacatgcatgcagcggttttttgtttttagcggggacaattttcacgtatacacactatggggcgttgaatcctcagatgaaacagtcgaaacctttaaggggctattcgtagctaattttaagttaataaagatatattattctccattcaagggttgatcgtgatacccttctccaccgtcggcgctaatggccctgaagctaagctatttcccagcacaaagtcccgggaacatgccgctgagtgagcttaatgctgtagccacaaaggaatgcttggcgttcttgaaaagccaattagaaagaagctagtggaggtcggaagcaaatcaatatcaggaaacaatcggcaaattcgcaatttgggtgatgggtcatgtagacacgcgtttcacatgttcatgcaatccatggatgtgcaatatacgtcgatatgccgatagattgaaacgaaacacaaaacaggtccatatttttccgtaatcctcatgttgcaagatgttgcaagtgttcaagggaaaagtggaagtgtccactaccaacgtccagtctatatcaatcacggggttccactgtggaccctttccccagggctgacgacgactcggccatcaactaatgttccaggccacctcgaggatcacgacctatggttctctactccgtatggttctcgatcttttgcagaaagaggcgatgctttctatattccggtggagtatatcctagctcaaccttagggagacttcttgagttgttctgagcgcctctcctgcggatccaaaatcagcctaaatgttctcaactcagaaatattggaacaaaggtgttccaccctgccgatcagtcgttaaccattggtccctatttatcaatcggtgactctgttcatgttttctagccaccttgagtccacccttgtccgtggacaaccagcgcatcctgctaagcaaagtctggcgaagtctatgcacatgaaacgagtgaccagccattctgttacggataaagtctaatgacgtcggaaaatagagggatgaggacatcatctctgacatgatgtgatacgacctcaaaaaaaggggtatcttgcaccaggcgtcctgaagtcgagttagagccctcggccgtaccacgttgcgaacctgttatgtacaacggatgtgagggaagcgattgatacggtcagaccatcctgacaatcatcgatttgcttttacgttattctgcacgcggaacatgatcgtcgcactaatgtttggtacctggctgtggcgtctgtagcccaactgtaccgtcgatactttccttgtcgaatgcctatgacaactttttaccttctcttacgcgttggctgaccagcaaacgatccagcgaaaatacctcaggcccaggccatgtgtagagctctgcccatccacgggtgctgtctacctggtccctgacaaccctagcgtcccccaagttaagatcgacaagcccacttctactccgtaccgctttaaggtatcatcgtccggccagtccaccttccggcctgtccagcctctgagaaagcaacaacactgaagtcatggcgcgatcacggaatccatttcggccttgcaacaagcttggtaaatcggcagacttataaacccgtcccagaccctccatagtttttttctccgaactataaaatctgtccttgatacaccacccatatatctgatttctgattcaagtttctccattctttactttgatatatcttccaattaatctataccaatcacaatgaagtacatcagcatcgctgctatgggcatgatgggctgcgccctcgcccttccccagggtccttctcctttcggcaccctgccccagggtgccccgcctttcgctggcgcccccagtgatgcgcccatccccagcgaaactgccaccggcactcctaccggcattccctctggcctgccctttgacaagcgccagttccattctggacccggtcatcaaggtcctcctcccgacggacctgctcctagcggctccccaactccgactggtcctcctccctcgggcttctcgagtggtttccccactgacttccctgcacccaccggtcttcccttcgacaagcgccagttacactcgggacccggccaacaagggcctccccacaacggacctgctcccagcagcttcctgacttccactggaactcttccctcgggcttcccaagcggcattcccagtggcttccccactgactttcccgctcccaccggctcccctcagtaaacactgagtagctgagcgaccaagtggcttctcgccatctattgctacactgaacctagtcttggacctctgatatgaattgatgtttgatgtcacacgcaagacagctttcgcgcctcgtgtttgttgtacagtggatgtgagggtctgatgtattgggagtagttgactcaattgcccagtactgtatacattatagggaatattggttatatcatgggaaagattggttgggatgcttttttctttcgttggattcgggtctgcgagacgatttattgtttatgaattgtacacaggctttttcgtcactttttggatttgaagatattgtcacttctctatcaatacacactcgtttgcgctacctaggtatcatgatgtatcagtgtcaaatcaaaactatagtggttagtcttttgatgtgacaaagtagttattaagtggccagatgattcaatcacagagctcattccctatcaaaaaacacgcttgtgcagatattccagccgccaaagttgacttatagtcatatattttactccatagagttggtaaaagataacagaatctgttacgcacagtcgtatagctcctcaacccggtatcagagacagtttaggcaaggtatctatagatacttcaagctcgctagcctatatatcccacctttctctactgaagcttgaaatgctttatactaggcctgtacttctgtgagacgagaggcaagtagaaatatagtagatatgtatcattgccatgtggttgagggaattgtctcattttgaatgttttgtttgacgtaggttggggctgctgttcgtttccggtcttgaagattgtttgtttacgtatttccttttttctcaatctctctgccttctatctgtcagtcttatgtatcttttggcttttccttgggcccaaggaaaagcagagaagagatttgtatccatctgtaaagcacacgtggggatggcgagagcctcaagtgactaggcacatatccatttaggaaactgtgaccccttgtagatgtctcaataaccttaagcaaagagtatctgcggccatctccattctctttgctttctagcggccgattctatgctgcattcacgatttcacattcgaggacaggaaggttatggtgtagggcaagcggaaatgtacctacaaagtgaaagtaatgatagccagtccactctgtctacaggaaagggacctgtgacctgcgatatctcaacaggatcattgggaatgtcagctcggccctagtcaagtctcaacagaggtaggtgtctcgagcagcctgggttgctataggttccaaaccgagtgctcttgcttgtgtattctagataaagatactaaaacaacaccattgcttcacagggatctaacatgtactgtatcgggtagtctatcgtattggaaccagaattcatgactgagtaccggttgtattgattccccgtttgtttgaaacccaaagatataaaagccctccaattgcttgttactgtctgtttttcttcttctcttcaaaacataaccttccggacttatcatccacactcaggactttgatccaactatccatcacttccatcacatctatctatcaacaaacaaacttgatcatggctccagtaaccgataccacgagcaaagccaatgggcctgctctacccaaggccaagctcagaatcaagctcaatgtcaagcccccggccaaggctgaaaccgaggtagaggccctcaaggccagtgacgaggagttcctcttaacccttctcgataccgtgaaggtcagttatctctcactcaatacctagctgctggactatatggtatactaatcaaagctcaccacaggtcgatcaccaggccgcagccaacacccttggaatcaacaaggcagcatgtcgcatgcgatttattcgcttgcaacagaaatacggcttcaagaagaagggccccaaaggtactccacgacgcaagaagggagctgccatggtcactcctgccaatgaggccgatgtcgccgaaggggaagactaatggggaggaagccgaggactgagacgaggactgagatacccggtcgcattggccacaactgtggtgttcagaagaagcctggacgggcagatgaatgaaatgatttcctactctcacctcactgtcctatcaatctgacaatctatggtcagatctacgtaatctagtagcgccgtagtcgagtgatatcgtgatccaagagatggtgacacacatggaaaccctacagtagacccagatccctccaatgtcgcgagacacagtggaatgaagcaatatacacatgtattctgagctcatctaatcccattgtctagcattacgatcgtagatgcccgaaaggtcaggcttccggcagctagctaaatctagcctgctcattttgcttttaaaagtaactcttgtcttcatttctattattcacccttcacttatcaacttacttatctgaaagcttcacacttactctaactcctgatcctatgattctacacctcactatcctgccatgagaaccgtacccagcattacatgattcaagcccgagatctgtatgcgtatagaaattttgaggttggcgatgaacacggtgttcaaggccgattccaaaatttctttggggacgtacttaataccatcttcgagttacaatcgaccatcacagcaaacatcaacctccgtttcgcagattttaaatgtatccagtctacataccccggcacacctgacttgatactgaaggacaacaatcacaccttaaaggtcgtgggggagctcaaggtactgtggattggcgagcatcagatgaagatgacacgaaggattgccaatgcgaggcttttgagagagatattggcccagcctattatgtatatgaagcatctgggctgtatgtatgtctttctaagcacatatgaagagacgatgttcttgcgacaagtcgtggacaataatggcgcatggaggattgagtattctcatgtgatcttgtcgtccaccacttacgagaaacgcatgatcacttcccctgtttctacgaagcaatattttttctattcaggtttgaatgcgttgaatcactatataaaatacacatttctctatattacctcgaccacactagagcgcgacctccttgccatcagagtacgcatattcaactatgcccatacagctaccccgagccccagcctgaatcgacatttcggataaccttgtgctatcctcaaattgtatcttaattaacagtcgactatataagaccgaatagcgaacaaaagggagagactatgaagtgtagataggaacccgggatcaaagttgaaattaaactaattctttaatgctcgaggggattgtatgatgtgagtggatgggaattgcagatgtactggctatgagagaaagacgatagacgagaaaaaaaaaggaaataagttacagtcatacatatatatactagaatcttgaatcttgaatagtctgagctggggattgtcacagcaccataaaccgtactaaagagcatacaggaagattagccgtctattgaaagacatcgaactccccaaaggatcaggaggacctgtaggagaaaaaatattgttgccgactttctattctagtccagttaccgttttgacggaggtagtcaaatctaagttctaggtgaacaaggtggaggatttctatacgtttattttttcttatctttcctggggctcaataaaatgcttgtacacaatctcaaattctagccctagagtaggataggtatccggagaagtggaaagtttcatattaatgcgaatgtctataaatatccttaattaattagctgggttacattcaccctgcatgcatatcgtactttatgcaagcaaggaatatacattaaagctaattgacatctattttaagaccgaaagtggccgatatgcaaactaattaaggaacatttgaactgacatccctgtcaagcgcagactgcagatctctgtcagctctcagcgctaacgggcaagccctattggtcggtggtgtgaacagctacaatgaatgagatattcaatagctggcacaaggccctttttacatctcttagagtagccccgttctgagactaagctttatatcccgacgccttccgctgaaatgaagtcctctcactctcagtgtcagactggctcgatcaaagtccctggtggactccatttgctttgctttgcttttattttcagcttgcgtctttgcagggattctttggagacccctccattgcccctcaagacccttgttcgtcgtcacctggctaccagccaatccacggcctttcccacttgtttgtttctgtattatcgcagaaggatacttgcattgaaagccatagaagtctcactgctctgccgacttgcaaatttgtcagctggtccttgtcaccggttgcttgttggttcttgttataacgcattaatatcaaccctgtcctatatttcccctctattattactctcctccccccgttagacgaatgtcatcttttgcttctgctggggggcgataccagagcagtgcgagtcgataccacacaaatctctcacagagatcatggcaggaatcgttaacggacctctttctctcttccgcaagtcggactcttcaaaacctctccatgctcgttggggggacgtgtctatctctgtacccacagatggctcatggaatcaatacgaaaatccccatcgacccgtcaaagagaaatcagcatacggaccaggctacgtgcccgactgctctccgcaagaccggaattcccgcccagtgaaagaggacgatccagaagatgattccagaagcgtctgcagtgcaacctcaacagcttcgcgacggagttcactatccttaggaggcctgcgaccgggccggctctctgtacgcctcgcttcgcgtcctagacaactacggggcaaatcacaaatggaaagagatgcccaacactccgaggaaaaacgaaatgagtttgcatatcgacccattcaacaagactacaactccgaagtggtcgaaaagaccactcagcccagcaatcgcttcaagtatattccgaccaacggacggtatattcaaagcccaggcattgaggctacacgcaacgcctactcgcggcgcggctcgtcatccgatttgattgatcaccgatacagcggtcgcgatcgtgatcaatacactccggccgtccgagtgagcaactaccacgaggacgaccgtcgcagtctgtatcctaacattggtgataattcggatagtcctagttcgcagcggaactatggactgccgtctagaccacggatgtcaccttcttttgcggctgatagcaggagagcttcttcaatctcgaagcctatgacgttagctatggtacctgatcccgataatctctatgagtaataggtctatgcggatttcgcttgcgtttggtgttcattgaccatcactacactgggtgttttagtcgttacagtttactggcctttcaatcttcgcgaaatgaaaccattcatcttctttttcgttatatttgcatttaaataacagtagctttggtggaaattattgaaaagtggatattacttcatttgtgatgtattcaaccttggattacggctcaatctcaatttcagcgctcttgtgacgtgcaactcaagtacttcttgatagcattccaattggcggattcttgctcccactttatcttgaaattcacattctaatcagggcagctgccagatatttgaacctctgtggcgatgtctttgaatatctcatcatgacgccatatcaacgtagttgccccggccaatagaaaatgccacgaaggagcgatccaaaacactttaattgtcgaatacattaaacaccaacaatagagaactcactatctcaataccatcttgatcaaaatggcagacgcagtagtccaacttcggtgtggtgtcaaggcaagtatattttgctaacatatctattctcgattctgatctaacccggtttaatagaacgatgactgggggaagaaaggaaaagagtcgatggtagctcagctatggtcgaaaacccccaaaaatggaccaattgacgactccaagcactattcagaagtaagcttttcggaattattgaaccaagcacagtcatgttgaccttcgagcagatgtggatgggcacgtatccttcaaacccatcccacttactttccacgggcgaacaccttggggactatctgaagaagcaccctgagctagtgggcaagtccgtccacgaccgatggggtgccgagattccatttctgccaaaggcaagcgcaaaatacaagaattatagtgtgtggccatgtagataactaacttggatctagattctatctttcagcaaagcgctacccttacaaatccatccagaccagaaactcgctacacaattgcacaaagaagatcctaagaagtatggcgatccaatgcacaagccggagattgcaatcgcactctcaaaattcgagctcttcgccggctggaaacccctgaaagacattcaatcgctgttcgagttgaaccacctggcaaagtacatgcccaaatccggacaattcaacgacgaggacctacgccaagtatgcaaggctttactcagcgcaccagccaaagaaatcgcacagacaatgaaagatctacaagccatcccggaatcccagttcggcgcacacacctacatccccagcctccttggtcgtctggcaaagcaatacggcgaaggcgacaacggaaatctggtcgccgccctgctgatgaactacatgaccctaggaccgggagattccgtcttcgtcccgcaagacagcatccacgcctacctcgagggtgatattgtggagtgcatggcgcggtcggataacgtcatcaacacgggtttctgcccggccgcagaacgcgacagcgtcgagttgttcgggcaggctctcagctttgtaccgcatagttcagaggattcgctgttgccgcgtaaaaagagcgacaagggcttgaatggtaagacggatgtctatgcaccgcccatcagcgaattctcggtgctgtgtactactctcggcgctggggaaagcgagacgcacaaggctattctggggccgagtctaatgattgttacgaagggttgtggtcagatgaaattccccgagaataaaaccgctgagttgaaggagggatatgttttctttgtggggcagggtgttgcgctggactttgtgaccgacaagggcatggctgttttccgggcgtatgcggagtaaagaggctccggggattttcggcgatagagggagaggaggggtgtggcagcaggaaaaggtataaactgtgtgatatttaaaaaagtgaacacttgcattttgccaatcggggcttggaagattgaagtaaggcttgcgttgtctcagattgtatgcaggcgccgaagccctaactgtgagggtttccaaatccggtaggagactcatcaaatcaaaagggccagccactcacactaatcaacacctttcataatcccgagccaataagcgatgattcctttttctgaatacttgatctatgtactctgtacactagtatctaatattgaattgcacggaggttcatttgctgatcgcgaggcgctttggacgaaccagtcaacgtacaacagcattgtcggcatcggcctcaactggaacccggtgatggcacatgtatcgacctgatttgtgctgcagcaggttaaatttagaaattagggcgcatttacaaaggcctagcccgacggattaggccgattatgcaggataatggaactaatgccggctaattttgtcaaagttttgattctatctatagctaattgatactatctttattttccccgcgaatcgctcaaaatatctttgaaacagggaccgtgtgtcagggacagactaagcttcgttgatgcgtttcagggtattaaatatctatatcctcgcagtttcaaagtatggattgttctagcatcaattgaggctcaactccaaaggcttactggtctgaatacaatatcgtggtggtcaaagctgcttgacttcagttctttgcttactttggatatctataccctggatgttttcgtggcaaacacacccccgttgaagtatcctttgcatactgggctatgtcaatcaattcctctcttgacccccgctccgataacaaccactattctcgctcccccgtcattatcattggtgcaatagctggcagcctcatcttcctagcaagtatgcagcccgagccgcaaccctccgaaagcaaactaacctaaaccagtggctggaagcttactatatctcttctcacgaaaagaacgggccagaagaagaaacgtccaacaatccgaggatctctcccctctcgaaccgccaccagcctataaaacggacgaactaggcacacccagaggtctccactccctaccccggcccttgtcttcctttgcaccggactacagtcgccaggcccagcatgtgcaagcgtaccaacagcagctctctcgcacttcatacgatcaacccccggcataccccacactgccaacatatgatccgtcacgataccagcctattcggccaacatccatggtgggcgatattaacgcccacacctatacctataaccccaccaatcatgccaatccacatcccggcccctcttcccgcttgagtgcagttcactacagtgacgccagactagcaacatcccggccagtttcaatggccgaccaagggcctccaattgggcccgtagctgttccaaccaggtcgaggcatcagccagctataccatctccaccggagcagaacgtcagacaggaacgcaaggataggagggaaaggagtgcatctgagccaatgatgttggcccaggccccaaaacaacctaaaccagttctgtcgcggctgatcaccaatttccgttgaggttatggattgtgatagtggcttgggcttggttttcttgtttttacgactatcacgacatgacgctttctgtttttgattatttggatttattcggccttggaaattgtgtttacaaatcaaatatattaaccggtgagaggctctaagtgttctccgtacagagtagaagacacctggtctgtgctataatctccgtccgatatcgatcaccccgagtttttccccttttcacatgcccttggcgcctacatctatcccaactggctccaacgcctcgatcatccctgagattctggtctctaattaattcttctctcagaacctgcgcaatctttgaggtactttgtgtactgtctactcgactatgcatattaatccttcaactccacttcgttgcagggattcaaatgcgtcacagtgaaacagtgctttttcgctttgagagagggggctaccccctcttttgatccctgtccttcacctggtgtttttatttctcattggcaatgactggtcaagaagaagccacttcaatatgtccatcacgccagttgttggaccaagacacctggattcaggatataaatctgccattccagatatctaaccccaactccgattatccatcgatggtctttgtccttgtgagtgcagatccctagacaagcgccatgccaagacgacgaacgacgagcgtgcgttgatacagacacactatatgcaacctatggccgacccgcgtcaaatccgtcaacgcatgttgactgcgccgcacctgtcaactgactatctattttgctgagaatggccgggggggaacagggatcgcaattacccctcccacatgcattgtctacgcacactgcagctataggagcctctctttacggccgcctgcttagatcctccagtcggccaagtgttcgccctgcaggttcgctcttttttcttattattatttttcgaagcgctgttgtttttgcgcattgcctctattctcagattctgctccgggggccaaccagaccaccgggttctctcccgggtctctaatcactcgttgggtcagttagctaccaacgccatccccgtcaagcacttcaccaagaagatcttcgctcttcttggtccgttggatatgcagtggttggctagtgcgcctccatggacgttttgttttgatataacttcaacgcacacgggcaatctatttgctctagtcaccttctctccatctctctttattcctcagccgtgctcgacttgtcgccctggggagagaacccatgctctctgtggggagtttgataagttctgaaatgaacaccgtactggggagtgatttgtcctcccttcggtaaattttaaccttgaacgcgtcacccttccagtccccatgaaagattggttgaaggctatggctactttcatgaagaagttcaaaaggaagcgcagagtgtccacagagctccactctcgctggggtgatgtttctatcacctatcccacgcaagggtcctggaatcagtgggatcaatcttctggtttcgtcgcgaatgcaatagcgagcaccaatatacagcccgaagcaaatcaacaatatccatccgccggcccattacgccagccgagttctagcgcctcgagcagacgatcgcgaagcacgggtatccgagaacaccaagtgggagacgctccatcctttccgactggatatttcgaccaaaacatacggcgtcgcgttggagatagagatacaaatacaccaccaggtccaggactcggccttcgtgatctgaggcgtgggccaaatcgccgaccctcaagctctattgacaatgacgaatgcactacggatgagtcatgcgaagaagaggaagaaagggaagagcgagatactccgggcccacggattgaattaagccctcgggaatacggcacgggggacgtctcacacagaacacgcgacgatcccgaagatttcgataccccagccaggtctcctccgctctctgtgacttcgcgcatgcgccgttgcagtctccaaagctgtgccacagagcctacaacgtctgtatctggtggcaacaactcgagacgaacaagctttacagctgcatcctctatctctgctccctctatgccaccctgcacgcctcaggttgcgtacaacgccctaaagcaacctcccttcccggagaaaagataccctccccgtacaaaacatcgggaacccgagtctgcgcctccacaggaaatggtgccgtcctatgatgagctctatggttgatatgaccccaaccaactacgtgcaactagaagtctatatgtggtggtattttattttatttgtttgtcggtgtcccagaccaaattggtcttgttcgaaagttctgtagtcgcccgtcggactcgatttgccttgattttgttcaatagttttgcatcatggtggtttatttgcaatttcaattatctcatataattatctgagcacaatattaaggaaattcacatctgtacgtctatcgtttgtccttccctaagtacgttgtactgggatctattacttcaaaatccggagtcctgtcttcccccggccctagcaagaggggtgttgcttggcatatcaaaactccaataatttcccgtcgctttcacactcgagggatgccgatagccgtttccaataggcctcgactggaatttgcgactttccttagatgagggggtgaacatgcgcccgtccgtgcatcatgcagacggtatcacagtcacaattgcttctcaccaatcaagcgtcagagttcatcacactctgtgcacctgcagctatccactaagagcaggaggactggtcgatcactccatcccaccaactgctcctcgattttccagccaaggtgcagtcaccaaccagcctataggcggcgttctctaagcgctgaggaccaacaccgggagtaggaagatgtgcttgattcgacgggcccatccttcccgttgcctcgcccgagaattagctgctctgcatgtgcttgatggtgcagcacttccctgtcatcctggccgtcatatccacacggaacggatcaagagctgattgcagtgaaagaaagaagctttcccaccccgagtaaagtcccacagtcccgagttacaatttaccgtctctcatgccaacgtgagatctctctatccggcactctgcccactctctcccacttggcggtcgctgtaacagaaaccgtcggactctgtttcactccggctcatcatgatcgggttaagtggcgacagttcactttcctctaaaatgctggcttttgtcctggctatagttttggtgaatagcccagctctagtggttttcgggttgaaaactacaccgggttcgccctgcactgatgtgtgtggtacaacgaccaacactacatcatccgagattgcgtgtttggatcaatcatacaaccagacatcagtagggaaaagtttcaaaaactgcatctcttgccagttggacagcgagttcaacgatgcggagaccggagaatcagacgtgaactggggactctgtatgttgtaccaccttccggagatcgcagactgcggttcatcgctcaggtctaaccgatcgaacagataacctgcgatatgctttctcgacgtgtgtgtttggatctccagactcgatctcgaatgtttcgtcaccgtgcccagtcgcatgcgatggcgtgcgtttggcagttgaaacagacgttaaatccccagacacatcgaatctggactcgtggtgtgaaagcccgtcgtttgcagataatgtagtcaacacctgcgagttctgctacaacttgacaaccacccaagtttacatggcaaactgtatgtatgccctgaaacccattcctatatcatatgatatcagcaaatcccaagcccaaaggttcaaaaaagcactactaagcatcatccaccaaacccagtcctcgagtccatccgctacaactgccatttcaagacagtaacgggcaagaccttcgacatagccccaacgagaatcttcagccaatcgctcctcccctcaagtctctctctcacaacgcccactgcaaaatcctcaaacctgaatctgggagtggtgatcgccgtgccaatcatagcattcttaattatcgtctcatccctcgcgatatgttgctttttcttcatccggcaccgacgcaagaaggcccgtcggaaccgcaactcacctcatctgtacaaccactggaacgatgggtcgccgatcagcgcgcaacagcaccagcaggcctgggctgagcaacagatgtataattccggcgggtatggccacggttcaggctttgcatttattgataatgatggccgcggacaggagcttgcctatggccctggccaggaccaacattatcaaagccagcagtatcagcagcacttccaaggtcaggacaagtcaaccttcacgcaggatattatcgaagagcctgcaccacaggaataccagcagcagcgtgctcaggttcctgctcgctctcaggtctttgacccggatcagaagggccagcatgttcaggatcctgttcatccgcaggtcttggacccggatcgaaaggactctcagcagtggcagtgattgttgtggcacctagtacctagttgtgctgtatagcatcgttgtaatgtctgtggatggcacagtcagttgaaggcttggaattaatgagatcaggatatcagctcccctattgttgatagcgtttgggtttcttgttttacggagttgttctgctttaggatcgcgtcgatatatccctgacatcttgcaatgtcatatctttggcgtatatagtttggtcaatagccaatgaagaaaaaagtgcccagcaaggctttcccgtcaagtacaataatgtactcaaagtaaaaaaggaagggagactgcaaaggagcagcatccaatgtcaccaggaagggcggcaaaccgacttatgtattgactgccagcccctctaccacctacatgtacacacataacaatccgaaaatagcatcaacaagccacagcaaagcaatgccaacgggacaagcggagcctacacaagccagactgtcagaaaatacgagaagaccggccatataacctttgagcgacagccttttgtgttccagcgccgctgcagattggccggccgttctgcaggcgtttcagcacgcaccgccaagggtccaggggtccaatggggatgggatggtcgaccctgatgttatttttggatctgtgagctgtgtggtgattttggggattgattattgggcgttggaggtattggatggcttgttgcttggtccttggtccttggggagatgggttttcaacttaggcgctgccacttgtccacctatgttgtaggtacattttttgatatagaatgaataaattgaaggattgcaattctacgagaacgtagtcatcgaagaaaagccgaagaaaactggggtaagacaagttgcgcccgttgatctacacttttatcttatcccaactctttaaccacccaaagctctcaactggccatgtccaacctcacccaagaacaaattaaagtcctcgagcaatcgcggcagcgtctcgtgcagctcactcgctcactcggctcgctgatcgcaagtctaaatcaaagcgaccctcttccgccgtggtaagagcgctaccatcccaccaaccccatccccagacctcagccaaatacaacgactatccagaaacaaactaaccccaaactaggacctccctccaatcccaagcaagcatcatctccaacaacctcattagcgtctccgaccaactctccgaccaacgcgacctcctctccaacctagtcgcctacccaggcccagagtacccgggccgaacacaagcaaacacgctcgagcaactcctccgcacaaaactcgatccccgcgtcgaagactgggttgcgcgcggccgtgcagccggtacagagtccaccgcagggccgtctaatttcagctccgattccgatgccgcgcataaaccgctgagcgatgcgcagctcgcggagctgtgggaatgggcgccgctggaggcgaaccaggaagcgcggcggaggaactggggtgggaattttacacttgaggagcgcgaggctgggattgagaatgttgttactgggttgaggaggcaattgcaggacgatgatggggaggaggagagtgaggatgaggacggggatggggatggggaggagatggatgttgttggcgttcatcggaagcctggtgctgctgagttcgagttcaatattgctactcaccatccgcatcctgttcagccgttcgtgccgctggatcttattttgagatatatgactactggacggatgccatagtctccgatctccaggcacttgactcagggcaagtagtctgtgtttacggctgtacttggtctacgatttcccatgaatagaacttctcgtagcatgttcttctaaatgcatgattccaaaaacggacggcaatattattcttttgaaaaaagcaaaggtaagcaacagccaagctatctaaccgcgtcggcgagtagtgggtgtcttgacggtaggtctcggggacgctcccgtgctctgggccgatgatgccttctcagctacctttgcgcgaggagcggctttctgcttgggcgtcgatgcgttccagtaccagagcatctggattgcgagaatcacattgagagagaagccaccaatgaatccgtagaggatgaacttgtcgtcgacttcctggagggtcgtgaagattcgggacatggatccgatgaggtagttgaacacctgattaaagaaataattagtgtttggactgggatcaggttgaaaggaaagagaatcgtactgtgaatgcactgagctgtccggttcctccctcgcgccagatggtgtagatttgaggcgccttgctagcaacacctagagcacccgcaccagcctgcaggtatgacatagtatgcgcatccaccagggtctggtcgaacaacagcgcataaatgctggcagctacgacagcaatgaaagccgcggcagcggcagagcgtccggcatagttcaagaccagaataccgatagcaatatcctggacggcgatgagagcagtctcgccataggtgctgaatgggaactggttgcgcacgccgtacgagagagtgatgagcaagctggcagtttcgagggcgtaagatacgaatgagacaccggccgatgaacgggagctgatcagcttcagaatctgtgggattttgacgactgcactggcaccgacgatggcaatgccgagggccttggagatggcgagtgatgtgcaggcagggtctttagtgagatcgagatcgaccaatagtgcaccgtggcaagactttccaatcaaggacacgacggcatcatgcactggttcagggatggctgagacaataggcgccaaataaggctgaagaggcgtaatcagggagttctgaaggatatccattttgacgagaataaacaccagaaaggaagaacaacagtattggaggtcaggcaatgtccagaagaacaatttgttgacattccgaagtcaacggatgtggcccgtgcacaaccggggaaattcaacttctttcgttctcttttcttccttctgcatgaccgacccgccatgatccccctgcggccatcccttctacgaaggcctcgagaggcgctattgtgctcgcaatgcctctttgggcctcgttctgtgcgccccgaggccaatcgggggttcctatcgtcctcgaaacggcggaccgggactgcggatgatcagtccccctcggtattccacaaatcatacttctcggccaatcgattctacgacgggtcaaatatcaaaggcggcctgctttcttcacttgcatcctccaatgcgaaaagcaaatcaaccacttcttcggctcccagcggtccgaatgtcagtcaggtcaattcgtctgcaacagcatcgtccgctgcgattgcgacagaagcaacaccagaggaactaccacatcggcggcgaaagcgcttgaaggatgaaagcaacgcaaccggaaaaccagaacccagccttccgctggatgcctcggcgcaattgtcgaacttctcatccacactccccattacctccatccgccgcaagttggctgcgtatctcgccctgacgaaaccgcgactgtccttcttgatcgtcctcaccaccacctctgcatacgggatgtacccaatctcgtccctgcttaccctcgacccggctatgaccccactccccacactttcgacctcgaccctgacttttatatacctgacggtgggcactttcctgtcctgctgtagcgccaatacactcaatatgatgttcgaaccgaaatacgacgcactcatgtcccgaacgcgcaatcgtcctatcgttcgcggccttgtctcgcaccggggagctctgctcttcgccattggcaccgccgtcacgggcctttcactcctttatattgggactaacccgacaaccaccgccctatccgccaccaatattttcctatatgcctttgtatacacaccattgaagcgaatccacgtaatcaatacctgggttggcgcagtagttggtggtatcccgccgctcatgggatgggtcgctgcagcaggtcagacggcgacgattggtcatgacacatggcgtgacatgcttttcagcgaacagagtatcgggggatggctgctaggtgcaatcttgttcgcctggcaattcccccacttcaacgccttgtcccatctgatccgcgatgagtataaagcagccggctacaggatgctatgctgggtgaaccccgcacgcaatgcacgagttgctctgcgctattctattctgatgttccccatctccattggtctttggtgggtcaatgtcgttgggagtggtttccttgtcggcagcactttcgccaatggctggctagtccgcgaggcatatcgcttttatcaacatcagggtgcgaacggtactgcacgtggcctcttctgggccagtatctggcaactgcctattctcttagtcggcggcctagttaccaagaagggtctgtgggatggcgtttggaggaatctattcgggcaatccgaagaggacgatgatgaatatctgtactatgaggatgaataagagtttgaaggcgagaaggctaagcaccatcccctgagctatcaaccgggagtactttgtccactgaatgagctttgaaccataagtctctcgtgctggatatcttccagcttcattcatctcacagagctaactccccttatctattcgaaccacatttttgttctgggattttgtcttatacggcggtttggagtggcgtttctttttcttgactttgtataacacccgtcctatatggaattcatacagatattttcattcttgtccttttcattctttttctgcactttgatcaaataccataatatacaagctacttcccttggacacgaacttccccgtctacacatccctatgcctgcagaaccctcatgtcagcagtaaggctttggacagcatggtggacgacaattgcagtctgcgaccactctccaaacaaggccttaatattaggatattgtctgggagcctgtttgacgagcttggccatggtggggcggccagctgcatccatcgcttgacaggcaggtttgtcatcgatacagctagcaaaaccaatgtgtgacacgcttgagttaaattatatcgaccaaactttgagagtttcagcaccaaagcgggaaccttagccattcggccataaatagtatgagatatctaaaaaaggctacacggcgaatacgcatatcaggaggttggtgaactctttgtataatccggttgatgccgagaggagagctatgtattcaatgtcctagaatgccaatgaaacctcgggtatagtatagtacatcagtatagtacaaaatggattgtccacgaggacattgtgatatacaatggccagtaacgacggccaacatctacttcctcaacttcaagtgatacgtcttcagtgcttcctcggtcatgggactcggcgctccaaccatggcatcgtcgccccccttgccagtcttcgggaaagcgatcacatcacggacggattccttgccgagcataacagcaacaagtctgtcaaagcccagcgcaagaccggcatgtggcggacagccagatcggagggcatcgagcagatgtgagaagtctgtcaaccgctcagctggcatttttaggatgtcacggaagatgaattcttgcactgctgcgtcgtgaatacgccgactaccaccgcctagctcgacaccgttcacgacgaggtcgtagtggtcagccactgcctgggtcgggtctgtgaggaggaggtcaacgtcggcgggggtcttgggtgcggtaaaggggtggtgtgtggacgagaagcctgctgcgccgccctgaccgggctctgagtctgaagagggagagaagagggggaagtcgacgacccagaggaagtcaaatccggtcggggccggcttgaagcctactgagaccgaggcagcgtgcagtgcacggcgtagatcgccgatgggggttgagcccccggagaaaggcgcacgggggcgtgcctgcagaacgatcaggtcaccgtgatcagggtccaacaattcctcgacttgttccgcggcttcaaaaccaaagggctgtagtccgcagagcggctgcttgccattgtaaacgaagacgcctgggccgccgtctgggttattgttgaacggcgcacctgcaggggagtcgaggaactgggtaatgaacttgtgagtttcagcgggattgttgtcatttccttccaccttgaaagcctccacgatgggattggccaggtcagaaatcttgccgactagatctacggggagaacatgatcaagtcgaatgatttccatcccgtatctcgtgtccggtttatcagagccatatttcgccatgactttctggtaggggactttgcggaatgggccctccggtgcagggtctttcatcaacgacgaccaaagtcggcgaataaccccttccacggtgcgcatgacatcgtcacctgtcgcgaaagacatctccatatcaagctgtagatattcaatcagcatacatcaccatcaaccaaccaaccatgtagtaatccatacctgagtaaactcgggctgacgatcggcacgcaaatcctcatcccggaagcagcgcgcaaactgataatacctcggcaagccactagccatgagaatctgcttatactgctgcgggctctgaggcaaagcataagccagcccttccctccgtgtaggcacaatgaactcccgagcgccttccggcgtagacttgaacaacagcggggtttcaatatccacaaacggcgggcactgctcctccagctcctttttgcaaatattatgcgcgcgggcgcggaagcgcagtgcttcacgcagctctgcatctgagcgcagctggaggtatcgttgctcaggtgggaaaaccgtttcaggcgtcataattaagtctttaggaaagtcgttgaggggatggatttcttccaatgcgagctcccataggtcttgcactggtgggttctctgtctctgacggcttggtctttttcttttgaactatcccgcgcacagccacggggctattcacgttcacggtcttgagcttctcgaacgcatcgttcttggcgaatgctacaacttgtaggctatgttgcagggtgggatcggataagcgcacgaaggatagtttcttggacagatctgctcggtttccgaggtatccatgtagtactacttctgtgtttggctcggcctgtgcgaagaacgtttcgaagtcgtgggtagcaggagggaagtccactgagaggcatcatgtgttagccacggtcctcccagactatggagaaaccaagcttttcagcacaagacaaccacataccagaccgcttgtaagcctctagaaattcaggaagccgtttagaaggctcttcctgtcgcaaataagcccgagcatggaactgccggggcgcctgaacagggctataacattgtctaggcgaaatggctgatcgaccccgcaggagattcgagatctcgatgtagctggatctcaaccgcaaattgcggagctgcacggcagcaattgtcatatttcaattatattgaatgcaattgcagccaaatcggaagaaagcaagacatgcatgtccggacaacctgatcattaaagccggcagaaagccactccgccctagaagcggactagcgcccgcaggaataaaaagcgcgggattttcacttgttcgtttttcttttcttcttcatccttccaagttttatacttgtgagtattgctgttcccagccctttcaatgggcattattgatcgttatactgactgtttgacagaatgatgaaagcctagtgtgttatatatgagacagtctctgccctctgagacgtgcggctctctctcttcggggagcttaagggctgtacgaatcgagggtagggtatgtgatatatgcgttcggcataccaaccttgtttacacaacggacgcgatgaaggcatctctgatccatttacaagacttgaaggtgtaaccatgggctttaggccatggtttgagggttcctcttgaagcagggagagatggatgttggacaatgttggtgacagctcgttcatatccgatgtcctctctctcggctcttagattcgcatctagctagctatacctcatcctcccctatgtatgggctcttctcaacagtaggattataccagggtcaattgtatcagaggcacaagtgcctccgtcatggttgaactctccttaaatccacttataagaagagattggatgtttgaacaaatatcacggacttcaatattcagtacttcccgcatgtaactatgtcttgtgtttgacatagtacgactaacatagccatcgttataacgatctagctcttcgtcaaggttaaattttgaatcgcaacgacatattttgatatgctgctttctcccagcaagtaatctatagaaaacaaaccactcctaaatacagtcccctcatcgaatatttcagaacaccctttcacgcaaagatcattttctctaacacctccttctccccactattgtcaacgagattcctaaacacgccaccctcaatccccataagatctctgggcgtgccaaactcggccgctttcccagcatccataacaagaatgcgatcaaagtctgcgatggtgctaagccggtgtgcaataaccagcagcgtggtggcattgcggccgaactccgcacggatagacgtctgtatcaacgcatcggtctccatatcaacagccgaggtggcctcatctagaaccataatcttaggccgcgagacgatggcacgggcgagacagagcagctggcgctgaccctgggagaggttgagaccaccctcagagattgttgcagagagagaggtgaaagcgttagagttggttttctggaccgtcgctggtgtcgtggtgcccgtttcgctggcctggcggggtgtggcagtccgcgatgtgagggtgagctcgtcgtcgtcggcctcagatatgaggtgcacgcgcgctagcgcatcgtagagttccgtatcgctgtattcatcgaacggatctagatttgatcgcaccgtgccggagaatagcactgggtcttgtgggataattgcaagtcggctacggagatcgtgcagtttgatcttggagacatcaagtccgtcgatgaaaatctgacccgagcgtgcctctaggaatcggaagagtgcaagcgtcaacgaggacttgccagcccctgtacgtccaacgacacctacccgctggttcttctccactgagaagctgagcccgtttaataccgggggaagatccggtgcgtagcccaccacaagatcgtggacctcaagatggccctctgtgggccaagccgcaggtgcatcggctcctccttggttctcgatctcgatgttggaatactcgataacacgctctatggcgttcatattcaattcaatgttagcgtattgcctcaatgccatcgtgattgcagcgttatactgcagggcaaagctgagagcaaaacccgcaagtgaagcgctcacacccggcagatagaccacgagcccagcagtgacagttgagaagatagcaccgatgatgctcatgcggaatgcgagccagcggttgaacagccacaagttccaccatgcttgcgcatggcgattgatcttgttgaacatgatttcgatgtaggtgtctggcttgctgaaggcacgaatggtgatcaggccagcgagactagacccaaactgctcaaacacggggcttttcgcagtgctctcaagacgtttgacttgacgggcaccttccaaataggatacggccaatttcagacagatgagcaacaggactatgccgagcaagatcaccatccagtcgacaagcatccccgcaatcatgattgcgaaaacatctagtagcttacccacgaagaacccgatgtcgtatccgattcgtgaatcgattgagtgaaagtcggctgtgaagcggttgagaattcgccccaatgggacagtgtctagccaccggagtggcgcgcggaggatagcataaatcaagccattgaaaaggttcctcgaggcccgcaccgaagccgaaagaatgcagtaataacggactgtccctattatacaggcagtgatcgagatagcagcatatactccgaggtacatatagaggtcatcatgttgtgggaccggtgcagtttctcgcatagtatgctgcaataggacactgtattgctcagggtgtgctttagtattggaggacgaacttgtccaaacattgatccaccaagactgtgataaataagaatcagataaaggacaacgacaaggggactgtcataggacttcatgcacttacccgtccaaccatgagggacgaaaacattaagtagaccgagagcgtcaccaaccaatagaccacagagccacctttattcaagaaagaaatgtaaactgctagccgcacagaaccggtttctcgtttttcatcttcaacaaatttcttcggtttcgtctgtgtagtagcaattccatttccgttggaagctgagccatttgtggctatgttcggtttttgatgggatgtattagagatcaccttttggagagttgtctcctcatcgttaaagaattcacggtcttctccatctgcgacaagatccgcttgttctgcggcatgttccttaccaaggatatcctctaaatgatgtgattccttcaggtcatcaatggtacctgcatatttgatacgaccattctccaacagtacggagtagtccgtgcgaggaaggcatagtgcaacatggtgagtaaccaaaatgcgagttcgattttgaccgagtttgccggtgagagcttgctcaaagacatgacgacctgtgtgggcatcgagagcgctgaagatgtcatccatgataagtatgccagccctagagtataatgcgcgggcgaaggaaatacgccagcgttgaccaccacttagattaacaccattcgcaccaatatcagtcatatcgccgtctggcaacatctcaaaatctttttccagagcacaagcaaagatgacctcttggtatcgctctgcatcgtctgggagtccaaagagaacgtttgctttgattgtagcattctcgatccatggcgtctgagcaacataggcaatggccgagtcgataatccaatttgcctttgtcgcaaggtggtcaaaccggtctttaatgggaggtggaacgggtacctttatcgttcctgcgaggacatcacattcacccatgatcgacgagaggagcaggctctttccagagccagttctgcccgataccacgcttagactcttcgttgggaatttcaaggtcatgtcacgcagaacgaaacgatcctcgaaatcttggatatcttctgcctccgcaggccatgcagcagagacgtcctcgaaagcgatataatcagcagggacagtattgacgacattttcgggcgtagccagaaatttgtcgatacgttccgagctaaccttcgcctccagacccatcgacatcagctccggtataacagcgagggccacctcgagagaattgaagactgccatagccgtgaaagccacagaaggtgacaaagtaccattgataatggcgtatgtagtcaacgaaacagcggataatccgacgggaccgagaacccagatcgcaagcaggccaatatcagcaagaaaagaagcccacaatgcaccaagttcggtttctcgcgtatcccggacacgctcctgccattgctcctccagagctgagaatttgatttggcggattccctgcagcacttcggtaacgatcgccagcttctggtcacgggatttcatcaatcggtcctgggcattcgaatattttctagctgcgtatacattcaatggtgtgacaagaagagagaccgaaagaccggcaaaggcactgcgccagccgaggatttggaccagaaaggcggcaccgatcatgattctgaagatcgcctgtgggataatgtagttgagagaggcaaagtcggaaactcgccgagaatccacggccacatggttgataatactctggcggctcttctttaacacatgatcgtcatcgtcgtcgacttcggctgatcctttgctggaattatcggaattatctggcttggacttctttgtatgcttcacatccttccgtcgcatggctttggcaaatataactgctgacagctctgcgtagatcggaaccccaagtctagaatagaccacccagataagccacgcctccacactcgaggcaacgaacaacaacccacccagggccaggacccagatatacgatgctccgacattccaatccggggtatcgcgcagttcgagtgtcttcaagatttgaaaaagggcgacctgtggtccaaagctcagaaagcaaatcgtcagactaagcgtagtttggacgagcagtgacctccaatgcgcagcgacaatcgctacccacaatttccggttctgtctggcagtttcgaatttctcacagagaaaagcagcacggttcgatgctgtaagcctggggatatcgtccaaatccatagtcttgtgcttcactgcgtagtttagcaagccattggcccagctgaaagtgaagcggctgagtagcgagaccgaaagctcccgctcaaccagcttatcttcatagtaaatatcaggacgacgcggtagtagaacacatggtacggcgcgaagagcagcgcaagcaatttgagccaattgcaacccgacccaaagtcgcccatgcggaaggccaagtcgggagaatatcaagatgcccagttcaatgcccggaaccgcaatggtaatgatactgccccagaaagcaaagtggccgagaacatatcggcttgtcggtcggggctcggcgaagaaagcaacagcttgaatagcgagcagaatctagaaagaataagaattagctattaagcttggcttaaatcgaacggttgtcggggtttctacatacccacactccaaactgcagccataccaatggcgtggaattggtaatggcgagcttcaatgtcgcaagcacagccgatgcgagagtgaccagaaacccggcgatggagaacagggcaatggcaatccgttgccatttatcagagaattctcggagggattcctcggtcgcttcgccatcttcatcgcggtagacatctttggctagttggatgggctcataatcgcgcgatttgcgtgcaatgcggtgggcaatactccgaatggcaggtatgctatccagagcaactagcgacaatgctagataggtagatgtcgccaagtaggccatatttttcagagacaaaaaacgaaagacaagagagaaaggcagacaaaagaaatatcatggcgttatcagcccccgactatagcgaatacgcttgcgcatgctagcgcaagctatagtgacatcgagcgggggaaatagaccgatctcagaccgccagtgactcaaaggcctcgcattcataataaatattaactgacagatttcgctctcgggctgtgtattgagtcacacgcatgcactatatcctgcagatctcgtgttcaagagtcactgtttggctgcacatcccctgtagaactcccgggctccgagattggaggtattgcgcggcatgtgccgaatagtatatcctgtactctctacggagtaagcactaagcagttagagcaattgctcactttcgcctcttccaatcccagcgaaatccatacgtccccacttgtatagcttgtacccattctccgtctaatgcaggaccggcctccacccgcgtctcggcacaaactcatccacggcctcgtcatccaagacgtcgcgccccaatcgcgccgtaataatactccgctcagcctccggtccgtgcacgtaaaacggctcgaagccttgtccgacgggtttagggatccacgttcttttcctgcctctttccttcgacccctcacttggatttcttatgatcggctcaaatccagaagcttcccggtctaaactgaggtaccaccgccgttggtggatcgagccgatcgtgttgttggaccctgggtaggcgttgtttctttggatttcaatgtcggcggtgtgggtatcgtctggacgtgcatgcctagccgggccggtctgagactcgggttgagatcgttgcggtgttggatccccacttgattcttgctgaccaggtggcggcgaaggcgatccagagtccgaggtcgacggcgcttgtggtaccgttggcctggatgggtgtcgacgacgccgtttggggccttcgcggatcggcctcgcgaaatcggttgttttatccatccgcagaataatagtgtagtcctttggtaaacgggttccatgaagtcggagtcggattttgcgcttggtgtttcagtgttagaggagtctattcagtgtctccatggtacagggatatacctacattctgaaaagcttctcgcaacttggcactatctgagatctgctcttccggtgcaacgtgactatcttcggagatctctgatcgagaatcatcggtctccgggccagattggtccatttgataaggtagaatttcatattctccagtatcccagataataagactccccgttttgtaggaagccgtttcaatgagatgattctgtgaagatgtaagtattgctattataccatctcagatcatcaacccacccatagacaatggattcgagtttcagttgcattccggtttaatcgctggctattcggatccccaggcatcccatacataaccgaccaactcacagagctagtctctgagaactggaggcgaagatcgtaatgcggccctgcgatgggatggtcatgttgatgaatgacgaaatgacgtccttctgggtgctcgtttcgtctatacagctcgatccattctttgatgggcagccgtggtaatgactgttttggaggtgggcgaacgtattctttgagctttgcggaaatcgtgctcagatggtcgatcacttcaacctggcctgcttcgatggcagcgaggctgggtgaagtgtttagttgtgatacgttcggcgggatggagtctcttccatctccatccttgacacatttgatggatgatctcttttttggcggagagacaggcgtattaaggctcatgagaattggacgctcgtcatttagcggaatttcttgtctcagctcatggtctgggctagtttctgggctgcaagcgcgtttcatgattagagcaccggagccgagggacgtcgtagccggtatcaagcgagagttagagccgtgacatgcatcgaagcagtggtattgtttgattcgactacaacctgcatgactttttatagatggaaacttgagttgatctcctgcggccacaaatggcttagtaacaagcttgacttccaaatttggaagctttcggtcaacgacgtcagaggtatgagactcgatgtatacgaagctacatattaatatcgtgagattacaggtggtgagagcgaattccgagacagaaaagttctagccaattgaataagtcaccaatcaattatatatctacgactgataccttttttatcttcagaatcatatctaacttttcataaagaatgttcaaattcatttcaatttaagactacatgcccgcgaaatacaaaaaaagcaatactggcaaggctagagttattgcagtgcctgtcaataaaacatatgaaactggagcccaatttctccccaagcagccctaattgtgagaattgagaatgggattaacagccacgctctgtgggttatggaagacatccttcggatcaatgagagtcttgatactctgaagccgtccaagattggatccccagtaggccatctggccattctcgaggtagggatcgacatatcccggataggaacgcagaggaccgggtggtcgattttgtatcaccacttgatgcaagcgatcgaggaacctcctggcaatgaatgcaggaggctcaaagccgacaacagcataggattgcatccacatgacagcatcacggtgaacataggccgtggcattcatgggaacatcgttggttgcgccaccttctaggtcgaaaataacccaccagttttgactgcccttcggtgcggtgtcgagatatgtaaacaaggcgactagggcgtgctcggtgaatagttcatcaattgtgaacgatactgacttggagtagaacgacgtaagtaacgctccgccgatcgagacaagataattctcagccgcgtgggctaccaaggctagccaattcgtaatatatgccacattgccattgttttggattggaagattgttttccagctcaaattcatggaactcttctctagttccgaagaagctgcccgtgatcacaatcccgccctggaagattgtgagctcggtggaataattccgcgtaatattaggctttgccacgacggattgccaagctttgaagagtttgactttgtcaagaacatccccttggctgaatgtatacgtgtattgcacagcgcccttaggaatttcctgagtgcgaactttgaactcagtgacgatgccaaagctggctgccgcacccttgatagcccagaagatgtcctggttctgcgtttccgatactgtcacaatgctggaattggccaggactacttcagcctccagaacatgatccagcgcagttccccattgtcgcgacatgagaccgaggccaccaatggtgaaatgaccaccaacgccgacctgtggacaagatccgtgtgacattgctctaccacctgcatgcaaaaggcggtcttggagatcacccaaatttgtgcctgccccaatcgtggcgatatgagtgtccgggtccattgagaatttctggaagtctttcaggtcgacgacgacatgaccatcggctcctcctagacctaccatagtacggttggtttagcaagggtaggtttggatcaagaatatacttccataccgtaattgccatagctgtgacctccactgtaagcttgcacctgatagtttcctttaacagcacagcgcacaatttcagcgacctgggtcgtattcttcggataggtgatcacctcagggtgaacaggaatggccaagttataggatggcagggcccggaattcatatagaagatctccccgaaaggttgccatattggggtttcctcccacagcggccatgaagcactcacggccgacgacgctggatgtgttccccattctgaacgagaacggaaattgagggttgttccaatatggtcaagttgaatgatgtatctggaagaaaaaaacaacatatggaaggagctccataatgaccaatggaacatatagaaggggctggattgcgactgctttacgagaggtctgctgctcactccgacgtctcattttcggtgccacagttgttacatatgtcacgattgtcacattcattgataatactcaggaggtctcctgattctttgaagacattcgtctagagattgttactccagtcgtcttgtcatgctactgtgtgtaggggctggtgtcacacggcgaattagtatacgaaagcgcttgaggtgatgatatcgagggtaaatgttcgaataggatggtcaaccaatgagctcataatggcctacgtgaataccgagagatgccgaaagaaaatgctcggggaccactataactataacggcgacgtgggtggtccccgatccggaaatcccttttgacatggaagaatatggaaagcttatcttgactcctttgttcctttgctttttttttaaaaaacactgaatttgagaagatccccggttacagatctttccccccctgcattccttgggcgttcctatactgcagctatcataaaaattcccgtcaaaccccagattacacttcccgcaatgacatcaggaaaaaaatctggataacaaagacgaatccgcagagcatcaacatcatgttcaccccaattcataccacgctgggcgcactgttactattccacggctcgtcaggcctgctcatacacaacggcgccgtcttcggcatctcctctctcttatccgggtgcgccttcaacccaagtcgtgacaatgtgcccatcatcgcgggtttggtatccagtattgtgccggtgtacttgctggcaccatcactgatcccgaactatcccgcgtcgccacactcctgggcttctgctgcagcaacgttgggagtgggcttcctattggggtggggaacaaaggtgaggagtatcggacataattgcaaaaccaggaacaagttgactaagtgaagcagaacggtcaaggctgtacctccggacacatgctgtgtggcctttcgcgtctctcgccccgctcattgattgcaaccgccatatttttcacaactgcattgctcacggcgaacattgtcaagggcagatccaacatcccgtcctgtggtacgaccccgtgctatgctccagtgtatccatctgagtcggagttaggcttcatggctggtgcagtgctgctggcgggtataacaaactttatcgttgtcccccggaaagcccgccggtcggaggaatctagggtcatctattcctatgtgacagggttggaatttggtctgggtcttttcatatctggaatggcggacccagcaaaggtgctcaggttctttgccttcttgactgacccatcccgatttgatccgtcgctagcgctggtcattctatttggaattggaccatccctgattattttcctgattcagaaaccaggccaagcggtcgaaaagggaaagcctgttgcaaagcctacccttgctgagaaatggcgactcccgacggccacggtgagtgacatagattggcggtttgttataggtgctgcgacgtttggactagcctggggactggaaggtgtatgcccaggccccgcaatcttgcggacaatcctgcaaccaacttggggtttgatcaccatgggtggatacatgctgggcaacctcatttaaagggaatgggatatagagattatagaaaattaattatccattagctttgtcgaactttggcgtgttctcgggggaataaagtcgtaatcggtgcataacggtgcaagaaaagaaagtatggaagtccggagatctcaggagctgcatcagaggtttgattagcaaaggaaataataccataagatatgtacaaattcggttcaagtgagaatagatgccattgatctgtgaataaatgcattgggtatataacagagggaaaagactagacagggaaccgaaaacacagaggggtgagtaaacggaagaatggcttacaactcagtctttctgtccatgcgaagcgcttccaacttggccgattcgtcgtcactgcgcggactaggggccgatggatggccaaagtacccttccaactccatccactcagcaacgaagccagtaactagcatgctccagtcctcgacggtatccaaatctaaatgctcaccgtcatcgtcgattgtatgccaaacaggagggaatcccttgaagggggcatagtcgataagatggaggatctcaactccctttgcgaggaaaggaatgtgatcatcctggatgccacccataggtgagagcgtgtgcccatccttctcggtatcgacgaaccacggatcagccgagacagacttgaactgcttcaatgtcttgaaccgcttttcaaggtcgcccaagctttgataggcccagtgagtggtctcataccaagattgaattgtcggggatttcgagcccagcagatccaaaaggacaaaaagagatatagatgacagaggacccttgaattccgacatcgcgggatagacttggtcatcccaatgtgtagccaaggcacgagctccgtagagagaatcggtagaagtccattcttgaaaggcttcttcgccatctaagaatataacctgaaggccccgctcctcttcgaggtagttatatagtccctgctccttcaacgcggaccatttcttctccagcgcagcttcaatgctgcgcatggcatgcataatcatcgcacatggcgcagcactgtcgatccccccaatgaagcctttcggttctattttgctgtcataatgggcgacaagagtgagccggccaacgtcaccaaccgaggcccaaggaggatcgcgagtagcgatgaagtttcggaagggtacctccttcccctttgatagtggcgttttagctgtagagttctggatctcaatagtccatttgggcaatgtggttcgaaaaaagtcggcgaagtgattgagcaccgcggtggagccgggggtgccagggacgcgggtccttagtataggtgagagcagagcgccattgtgaatatcgaagtcgttgttggggcgtaggagctcggtcagcgtcttatccgatattttctcgtatgcttccacacacgctagaagcatgacaaaaagccctagccaaagtgacacattgccaggcgggatgcgataagccggagacatggcgttgaaggaaagctcgcgctaactgctcatgacctgcatcaaagcaatgatcggataaatctcaagcctagtccagccagataatcaacaatatcataaggtatgagatcaaaggagaatgtgtcaaagacctggcaggggtcagctcatctagcaatccagacggagcggaagctaaggcggtcacctttttgccggccccaatttattgggagatcgatcaatgtcaatgtctaaattccaagccaactacaacacatagacacaatgcgacttcaaattttacttcaccctcaattacgcacaactctaccagagtgtgcccagcgcagtcttcggaggaacgtctgggttcggttcaagtcacagatccctcggccatcgcagaagcatctttcgccattacccaagtcgaaggaaaccgtcccagctacgcgttctccagtaacaaggacgctcacaccgccaaagacaaccaccaggacaggtaccgtgaaccctcccggccagttgttagacgtgcgtgtgctgagctatagttacaggaccacctgaacgtatcttagtgtactacggaggaacgggtagagctatctttctggggacgctacgaatcaccacggtactcctatttggtgcagcgtgtctactcgttgcaccagcatgctccgtggctgacgattacccctggtatagcacacctgcgggtaagctaattgaacatccacatcgcctgagcgtctatgctgattttacctcagtgattgccgctggtgccctcccgatgatatttgtctcctatactgcggcgccatatgtaaatttcatccatctggcgttgccagcctttgcgaggaagtcccgtgaagctgccgtccagtatgcaaaagacctgcctccgacggccgtgctgtatctcaccagcatgcgattcaacaccattcctcggcaaacagctgttcgtataggagatctcgttccatttaaagagaccttgcggcccgtcacattccagaatctgaatccgtcgccgcaacgatggtggcagggcagagctccgacccagttctatactggaactcacagcaaacccgggagacaaacatcggctttctacccagaattgtggaatggaatctacgagcaaattcagaaagccaagtcgcagcctcgttgatcgaatatatacccgccacttgatggctgccgatattaatggtcagatgcccatttctctcagttggttgatcgacggagctaagtttcagtcactctaatcgaagacgtttggttggatatcaattgacaattagacacgccagacttatttcacgacatccatttaccctaaggttttggatctttgtcatatagaaactatccatatgaagtctcagtcacgcgttaacgaaagaagtcatttgcccttctttaggggaaaattcgtccgttcatatagtgtcgatatgcctcaaccctcatctagctctcatcttaagcaactctgaaccaaaggttctcaaagcaaacatattgcctcttccagtagctcgtgattgaacgtccggacgttaaatatccgtcatttccaactcggctgatgttctctttcttcatccacctccgcgttaacggtttcacttaacgttttcaagcacgattcacatctatcaaatcttggttttccctattcacgtcgacgcggtttctccttctcttcctcaccacctccactcgcccatacaacttccttcttccgttgtacacccgttacttcaagttcaaatccgtctcgacgctcgaccttgactaccaaacttacatacaatctaacccggctaattcaagatgtcttccccggctgccccgaaggagaagctcttcaccggtatttccgccactgagaccaagctcctggtcttggccaatgtctgcctgaagaatgacaaggtatgccattaatcctaggttcgctcattggaatgtgcttgctaatacagtggaccacaaagatcgactacgagaagcttgctttgaacgctggcatcaaggcgtcttctgctcagacgctctttcgcaatgccaagcgcaagctagacaagatgtacggcaatagcaatgctgatgccaatgccaacggtgccacggccgacctgtcgcccgaggagactccctccaagcgaggaaagtccaccgcgaaggcgcctcgtactccaaaggttcttttgtcccccaaggcgaccaagacttcaaagactgtgaagtcccccaaggcgaccaaggcgaccaagacctccaagggtgacaaggccgctaccaagaccgaggagagtgcagaccaggtttccgccaagcccgagcttagtcctaccactgcaaagtccgctgctgatgtcgctggaggtactttccacggggccaccgtcactgggcctgccactgagccatccgcatctgccgccaccactgagcagaccgagcaagatgaggaggcaagcgacaagatcgacaacaacgacaaggccgcgcgtgatctggtagtgaaccagcaccttcctgagtctctacttgccaaagaagatgatacctacgaggaggaggcgcaggaggatgaacagcaccaggattaattctatgctcagcaactccgaaagcacaaggtatcagatttgcgaagcgttttttctaccagattgctaggaggtggttcggaggagtatgtgatgagggaactgtgaatgctctttaaagaaaaacaaaaaaaaagtgtctattggggtttagtctcaaggcagtgataaagcattcaaataaaacacaatgaatattgtatttgctattctagctacgtatacgtatgccatattcatacatgccaataaccggggattttatttgtggcgcctgcagtcaactggcgacccagagcccaacccataaatgtctcttctttcagggagcagctatcggttctttataaacagttgattgattctagagtaactaagatcatgccagattggtgtatatcaaagttcgctagaaggatatggtatctagcagttcaatctgtacatgtccatttttatatttcccatctccagtccgggaaactcgatatcaaattggatgaagaggtcactcgagaagctcatcccttcagtttattttattacttcgatgaatgcaatgtctcttccgaagtgggatccctcagtcttgcgaccctatttatatactgacttctcaggtcaccttgagagtttatcttcaatgatcacttgctttttacacaaagcttgcctttacaatcgtttcaacttctattactgtcccacgtcacatagtcatcatgtctttcacccagaagcaagagaagacctccaacctggtgaaagccctaggcctcacccaaggctagatggaacatttcctaatgggatatctgtgcatgcaaaagcccaaggtatgtgagaaagtgtgttactccgtgagtacttaagcttaagaatcttcatgacagattgatcggaagaagctcggggcgcttagcaaggttacgccttcctccgtcagaactgtccacactaagggccggcgcaccctcgagaaatgggaggagacggtgatatccggggctacgaagaaagccgaggaacatgaacgaatcgatgaggataaccctgatgaggctgtggaggctgcacatgtcgaggataccgagaattaggaaggaatgaatagccaactttgcaacagtcagctagtcttgaggttccagggagctgacatgtgttgttcaagatgaatccaacttatacataattcgaaatccataattgaaataagtacaaaagtccgttataatataggctgtgaccttcgagtctaatatcacaaattcccgatttccacaaataaagtacaagtaagcgttgcttcttcatcctcttcactacacaacagatcgttttccatagcatcaatatctcacaacaacctatcttcagtgcctttgcagagcacaataaatccctatctcatcaagcagacaaagagcccatacatatgtcacccactgagaaaatgtcgaccacgccatcccccaaaaagaagtccggggactggggtaatctcacagccggtgaaatgaagctggttatggccagtgttctatgcacgtctggaaaagtatgcacgctcttaatactgccttcagtcatgactcaaactgactgttcctgtaatttagcttgacaccgacaagctcggaaagctgaccagcatgaagagaaactcggcagcgagtcgatttccatccgccaaacgcaagctggcgaagatgtttgaggatcagttggaccttctaggcaatgagaatgactccaatgtgaaggaaaaagctccagctagagtcaaaaagcgccgtgacaaagttgttgaatcacccgaacctgaacccgaacccgaacttgagatcaagatcgagactgaatccggagagggcatgagcaccgacagccccgtgaaggctgaagctgaatcagagaatagcaaggttgaggccgatgctgatatcaaaatcaagcccgagcctattgactgagtcatgaaacgtgcctatgtctgagacgcagtctctctcaagggtcttgattggggtcttgagaagggtgttctcacataaatttgcctaggatctgtgatttgatttgaccaaaattacccggcagaaggcgtcttaaatgcatctagtttgtcctgtcccatgagaatggctgtggcatatgtttgcctggcaatgagaactcattgcacaataatacgatatggctaccggtaatgtgttcagacatggtgtgacattctagataatggatttgaagtaaaaacatactttgctatgggatagatattcacattcacgggaaacaagataaccgaagaggtccagtgacgccctctgaaccaacataaaaaacgacaaacgacacgaacggccagttaaagtgaaagatagacacaaatatcatagacccaaattatgaatatggacgcaataaagaacgaagcaccaccgaataagtatctcaatcactaaagcgcctcgattgccttcatcaagacatccaagccgcgatcagagacatcgcctgcatttgagtcttcctctgtgacagactcgcgcagcgcccaggccacatcactccaccagcccagacccacgaagccaccacccttacggcgctccaggctctctttgagccggctagtgtgttcccactgcttggcagcagtctccgcacgttcaataattttgctcggaatcccacacatagatgcacagtgcataccgaaactgccttctgcgacaccattctcaagcttgtacaggaaagccacacggcgctcgacatcgtcgacatgaatggccatacgcttgggtgcaatttcgggatgattttcgaactcggcagcaagcgagtggtagtgggtggcaaagaagcccaaagctccaatatgggtagcgatgtgatgaagtacggcctgagccacggcaacaccgtcataagagctagttccgcggccaagttcatcaagaatgacgagtgagcgcggagtagcctcggagagaatcttctttgtttcggacaactcaacaaagaatgttgactgggcagcgaagatgttgtcgttcgcaccaagtcgagacatgattcgatcgactggggtcagtcgggctgactggcagggaaggtagcaaccgatctgggccataatgacagcaacacaggtctatacttgttagcaacatcattaaaataaagggagaaccgaggtggacacaccattcggagaacagtagactttccggcagcattagcaccggtcagcaagtcaatgctagcatgtttgccgccgagctggatgtcgttgggaataaagtcctcaacagaggaaagaagacaagggtgacggagctcttcaaactcgaggacacttcgttcgtcgtccacaaacactggtcggcaactaggatgaccgatggccccggaagccttagctaaactgatgaggcaatcgagctgcgatacaattctaacagcagccagccatgtgctgtaatgctcatcaaaccgggcatggaaccgcccagcgacctccttgacgatttgactgtgggtttcttgggcctcttgcaatttgcgaatgaggcttcggagctcgggaaagtagtatcgcttgacctgcttggtcgcagacatctggttccaattcttgggaatattcttcactttgatgggaacttcgagttggtaaatttccttgccgttatcccggtagcatatagcagaggaccccaaatctcggcgagcttgcttcagcatggcgtcgaggtcccggtggagttgctcaatgatctcctgggagttatcgaagtcttcttcgacaccagactccggaacaagaatcccattctcttttgcctttggacgatcgaatgcggtcttccagtatcccagcagagaggcaagatcgggcatcgctgttgtcaattgaccgataatgctttcgcctgagcccgtgtcactttccttaaggagacccatgatgtaatcgatttgttcgaatccttctaggacacgtacaaagtcttgagccttgcagttgccagcgtggatacgggagatcagtcgttcgagatccggcatctttgttaattgggaggagaactgatcccgggtactgggatcggagttgagtgaatcaactgcatctaatcttgcgttgattttctttgaatcaatcaatgggtggcatacccattgcttgaacatgcgtttgccgaagggcgtaatgcatcggttgagcaactggaagagagtgccctcagacccgccatcgaaggaattggcgaagatctccatgttgatcagggtctggccgtctagtacaagacttgtagccttcttgatgggatcgtaccacgtgaagttgccaatggtgatcaagtctcgctcaatcttcagcattcgcagatattgaaccagagcaccgaatgcagacatcagtaattccttctcgcgagcttgacgcaggatctcgggccaggcagtgagattatcgtcgtccacagagacgaaatactcgcttgcctcaagctcccgaacagtgatatcagattcccagaactccttaccaggtttcatgaaattccagatagtggtgggtccagtgttatttttcagaatgcgcatggccttttgtgaaacgcaagatttctccagtagcaactcccgagggcgggtctgcgcgacaaaggtttcgaacttggtcatgtcaacatcgtccacaaactcagacaagaagaattgaccggtagcagtatcgacaaacgctataccgaacgcgggatgctcgtccacaatggcctccttaatcgcaacacagtatgtggacatatcatcttgaagcatggaaccctcgaccagtgtacccgcagtaagaacacaggcaagctcgcgtttgatgatcttgtcttctttggtgggcttcttgccctctctctctcgcatttctttacccagcgcggattcagattggtccacacgggcaatcttgaagcccttggccacgaattggttcgcccagtgatctaaactcatctcgggaacaccaaccatgcgcatgttcactctgtccgtgagcttgagatcaaaaagttggtgaccaatagtggcatcgttctcatagagttcatagaacttgcccttcttgaagaaaacgacagtatcccagaatttctgcttgatctcccagtattgtttctcgaaaggggaaaatctagaccatgcgagcggagggatatagacagttcgcgggtcgtagtcagggtggcccttagggttgccgtcgatgtccttgagattagcaagccatgaatagcgctgctcaggctccttgatgtgggccttttcctttttcgcgctagatgctgtcttggtagacgctacagcagctcgttctttccgaggttctgtattctccggatcaaacgcccatcgcatcgcggttccagctgaaccttctccctctgggacatcaaggtcgaggtcatcatcgggtggaggaggagcagggacggaggaagatttagaggtaggcttccgtgccgattgtgtggatggtcttttcctcttgtttgaagatgtaaccgtctcttcatcagaatcatctgcaacgatgaaatcgtccaattctatatcctagtcagtcgtgtaccagcaaacccaaccagcaaaagaataccataccatcatccgagtatcctccatctcctgcctcgttgaactcatcttcgctttccggctcggttcgtcttctcttggtcgcacggccggagacgcggtccttgcgtttaggacggaagatgacctcgtcgtcatcctcgccctcagagtcagactccttgtagctgacctgctttttcccctagacagatgggttaacaagatacatcaattgagcaatcagatgccacacgtacccgacgcgaaggtgacatagtggactcctgttgtgcctctttggtcgtctaggaagggaaaagttcggtcagattaaaggaataaacaagcagcagagtccgaatcaatatacctttagagaactaccattttcctgttcgtcctctgggactggaaggtcgctgcttgggacgggactcagatcctgcgcaaagcttgagaagcttcgcttttgttccttcggtgtgggcttgacagcgccctcactccgcttctcggaagctctctgcgcgggggaagatgccggttctcgcgttcgactattcgagggggtcgctggtgaggacttttggaagaaaccaagaattgacttctgagttcgcatgttctgggtgctgggagttgtgcgcttgagcgcgggggatggcgacgcagcggacggagatgaggccgatggtttggccatacttttcttatgagatcaaagcaattgagatcaaatgaaaatacactctcaactcaacatagtaatcaggggagttgtgagggaattggggacgggtggagataaggcgcggatcgcgtcgacgcgtaaagcacttcgagactcgacctatccattgatcgacacccgtgaccttgtcttttctccacctgttatgagcacttgcgaagtcttatttgtctttatgaagatggcttgataatatttatactattgtacagattgaatattgtagcattacagatttagtggagattcgccttagtccgacttggtcggctcagtcggctcaatctactcagattcagtctcccatccaggagccgtgagaccttgcgcacgatattcttcatcgggcacaatgtgaacagccttgagcttccatttgcccaactttaacattagaaggttgccgttcaagacaaactcctttgttttctctgcgtcccacggccggataggtgtgaaggataattggtctgacatggggccactatcaccaggacggctgccgactttggcgccattgttgacgatgactcggtggccctcgctcttggatgaaacaaggccggctgaccatagaattttattgaacggctggttgaaaaccagcgattcgggcagggtgaccttgaaatctcccatgttggcccaatttgtttggggggcatatggatttccggactgaggagtcgagaagccagcggtgggggattgcggatgaccagattgaggagaggatgacttgggaagaggagtgggctctgcggttgaggatcggggacggaatagctggcgatgttggagagccacggcatcagcttcgaccttaccatggataagctcgacaaactcatgcgcgagcttgtgctgcgcaacgcgctgagatgggtccttgttctgctcctccatgatggtagcgatttcaggcaagggtacgaaagtgaacatcttgagatattgctcgacaacatcgtcaggcgtgcgcacaaagtactggtaaagttcgaatgtagaagtcaggtccttatcgagccaaacggcgtttccagcagacttgccgagcttctcgccggacggggttgtcagaagcggcgtagtgaaaccgatcgggcgatctaattctgattctaatggattgcggagttgttcgtcggcagtgtttcggctgatagacttgacagcctccataccgaacagaatatttccatattggtcggcacctccgacttggatttgagtgccctgttggaacagcgtccaccaatcccatgcctggagaataggataggaaaactcagcaaatgacatgccatctccttggttcaatcgcgtcttgacactagtagaaaagttcagtaaacccgcgtcaacagcactgtcggacctgccaaaactcacgtatctctgccgagcatgggaccaagtcgcatgaaagcgccaaggtctcgcaacacttcaaggaagggcatcgagttccaccaagtgttgttatttgtcaacgcccgcttccacattgggttcttctcgtgtccgtgtctcctgccgtagtgctcaatgctcgagcccaacttcttcaactgcatatgcatgctagccatgtttgctttccggattgaggaatggacagcatctcggcctttgaggcgcccgctggggtcgccgactctagaagtagcaccgccgagctatggagtattaggttggtgcattcaatttggcgtgaagtaggcaacttactagaaatgtcacaggtaatccccagacatatccccaggccagaaccatgaaaggaagcatgtgtccaacgtgcattgagggggcagtcgggtcgactccaacatatattccaacccgcttctctgtgaagaccttgtgcaacaagtcccgttcactgtaatcgaaaggaaacgattagcgagccattcaaaacctttccggcagcaaatgccagcaacttcattatatcctagtgtgcacatacccgacaacatcatggatcaatcctcgctcttccaagtgttgcgcgaagttcttcctcttcccggctttgatctcctccgcgaagccggcccattcctgctccccgtctttcatacgctggatatacttttgtgtaatccatctctgctgttgaaagcatgtcccggactgcaaggtggacaatactggccgattgctgtcaccgcgcggcagaatcgctgttgttgcggcaaaactgcgcgctccgcacgggatccgacggggtgtgagaaggctgcggtatggcgctgggccgagcgatgccgactgtagtcgcattggaccggtgtgagaatgaggatattaataaaacggctcacaatggactcgagtctgcacacgatcaacacctccagggccagctccagatgtccgagattctttcgatacgtgcggaacattaatgatgcggcccttatctctgatatgttgattgatttcctaatttgggctatatttagggcttagggccagagaagtacatggactgggattcagatccgtgattgtagagaaagatgccatgttggaataatactctctccatctagcaaacaaaatggtaaagtctttaaagacgactggcttcaagtgctacgtcaactcacaaaaacctgcacgaatgcctcgttactccatccactgtccaatttcatcgatttccatgccgccaatatatcgattgccaggacattagcattctctccaccttgtttccataccgtattctgtggaactggtcgtcccaaaatcatgaccatgaagtttcgtgcaatgctcctgtcttgaagatccgagaaatagatccccagagtgcccagcgcttttaagctgatgtcaactcgtaaacgaccgttctcaacaacagatatatctgaagtcactatagccgctacaccagtcatctttcccaaaagaccaagcacagccacgtgtgtcagacggtcaccagaagagttgccgtcatggctgcccgtcagcatgaacgactgagtcgggtaagcagtgaggatctcccagccctttggccccagaacaactgataccagagattcccggctcaacggccgcatgcgatgcgatatcctaccgctgctgtgtgcacgcacaatatactggccttcggagtcctcgtgaattcctgggaaatccatcaatgggactatgatcgaggcctcggcagattgaatattgaaaacgcctaagattccacttccagtcttggcccagccggtatagcttccaacgcgcagaacacgtccttcgtcgtagtcgttgtatatgtctatcgtgcgtccaatgacactaggacgcaagatcaccgtgattcctttgacagtaggtgcagttatctgattgagtagggccaggtcatgtttacccggctcatcggtgatataaattggccctccggatacacatcgagctgcagcgtggaatgacgcgtataggtgacttgtttggaacatatcccaatccggcaatacgttcaaatatcgggtgagtaatgcattatgagcattacaaaacacatgccatgggtgagaggcaacaacatctggaaagaagtcgtcggagtttcgcaatggaatagtgggcttgttggtgggcatttgtgaatggaagattatttgaggggtcattgacccgcatgagattgaccgagtgctcaagtgcttaagtgatgcgatagaccatgcatcttgataagaagtcaagaatcttcggcggtccgctgggtcatcaaggaggtcaaggaagaattgtgcatctgtcttgaccgagtctataccaacagacgtaaggtagtcatagaactcatcgtagaatcggttgatatcatcgggatcaatggcaacgattgtgccatctagagggctctccgtgaatgacccattggcagctgggtctttgatcttcacttgctttgttttgaatttttgggctagatccccatctagtgagatgcctccccaataacccagcaaggcatgccagaccgcgatatggtcgatatcgggatgtgatcgacgaatagctcccacagtatgcttcaatcctttcggaaatcctttcgagtgtgcttcgaactgcttccagccttgcttgaactgagactgcccttcattgtcggttgtctgccagccatcatcgataataagattgacgatgttgatcccattcgccttcaacgagtctaaggcatgcaagatcttctcttcggtgaggtcctgtccaagcccattccacgtacaatatgtgagaccgtcgaaccactcagaaagccactgtgcactcgggtctttctcaacaatgaccatatcatcaccagggggagatagtgggaccgaatcgtccaaatccagatgactcgtatcggcaaatggcctgacgactttccgtgcctcataaaccactgcagacatggcaacttcaaagttttccgctgcgctaacaagcacatggaattcagatgcttctaaatcgtcactttttgcggagatcacgacttcaccgttcccacctgactgaaacacggtcaaaacatcgttgactccagaaacggccagtagaacaagattcacgccatcatcacgcaggaaagagcaaaatatcgcatcttcagtgagtcgaaagttatctttgccatgtctagggcccagccatgcgctccccacacgtactagtgagaaatacctcaccaccgacgaagcggtcccaagtgcaagttgtttgatggttgaagatccatttcgaacagcatctgtatctccagaaagagcccagaggatcgatccaggagcttcactaggtcgagactcaatccgcaagtcaccatgaagattatcgatgtacttttctagttgctctttgggagctcgtgcagcgacaccagtggacacagcgttgtcaagatcagagtagcgtgcactatataggatttcaccgtcgcccactgggtgtctttgattagcccactgccattctgtgtctgggctagttcggaaccggactgtgaactgtgcatgacctcctggggctggtaggattatctcttctgagaatacatagcgatgatagttgtactcttcatcgtttccggacaaaagatcagcatgatctgtgttacatctttgcaatggcagatgttcccattcggggccagtgatgttatgccagatctgtgcttcccatgattgttcggggaatgagccgctggactcgatagtgaccgtgaaacgtagctgttgacaattttagtattcctttgcattacaccctcaatcatttcagaaagtctggcaatatcagatatgaccatatttgggggactcaccgcatcttcttccaatcgcgatgccttcttcgccgtttggagacaagtgatttgtcccagcggaggataggatgtgacacgtgcaaacatggccatttgagccggatgaacaaatgatgcttgtagctgtcgtgcactttggctagggccctggattgggagggttgaggtatctctattaatgacctccattgaagaaaggtaggttgttggatgaggtatctcgcccaggaggcggaaataagtattaaaaaaagattatttacgaaatgtctcacaagagactatagaaaacttgtatgcttgagtgtaacagaggaaaagaagcaggtggttggttttaactcctgcaggggacggaagtggcggggaagctaccactgtccaaccagaatgagcctcacctcatctcggacatcaacatactattttcgaattactaccagtttttaagttgactgccttcttgaaaactgcaaagacactaggatagttctaagtattgtatgttctccactaataaaaacttcattgtttatttgagatttataaacaggatgaatgaacataaaaaaaaggtaaatgagagaacgacaagagtcgaaccggaacagtccaggtagtggaagatcttaggcacttccctcgtagtacacgcaaagcatgttaccactgggccacccgctgttgagtcatcagtagtagcttccttttccttgtctctcgcactttccaacattagaaagttgtcacaacggatgccagcaagacttatgttatattaacgctgctccctagcctcttttcattccacttcttagttgatcttgatagtcaactttccaaagtgcttctgggtccactgaatttcgatctgttagcattcaatccctccttcctaattaaaaacaacttaccatatgatcataggcttcccgtgtctggtcaagggtgaacaccttgtcatccatcaaagggtggatatcattagcctcgatggctcggaccatatccctcatgagagctttgctaccaacataaacaccacgcacagtgcagatgtgagtcaaggcctccaaaacaaccggctgcttcttcgggtctacgcctgaaaggaacccaatgacactaatgacaccgtcatacttaatacacttgaagctctcatgaagcgttccgctgccacccacttcgacaatctggtccacgccagctccgtcgggggtcagcttgcgagcagcatcgccccagttaggctcagtcttataattgatgacatgatcagccccaagcttcttgagcctctcggccttctggggagaagaggttgtcgcgatgactgtcgcaccagcaactttggcgaactataaaacaagcagcattagccaagtctattatgaaggagagcagatgagtttggtactaacctgcaagctaaacatactgacaccaccagttccttgaaccagaacggtctggcccggcctcagaggcttcaggccatatagtgcattccagctggtgagcgctgcgcacgggagggtgctagcttcgcggacatcgagattttttggcgccttgacaagacccagttcattgaatacgccatattcacgcagggtaccgtcgatcacaccacctagtccagtattcgctgcgtgtatgtcaatgtcgccgtattggtggccctgattgaagagagtcgcaactcggtcgccctttttgaattcaacgactttggatcccacttcgataacttcgccggcgccatcagatcccggcactacaggcaaattgagaggaaatggatagaggccctgtgggagagaagttagaggccggttatggcaaagtaatggtgttgcgcaaacaattcagtcaaagtataaaatattggctttctcgtgcaaaggccatacctttggaatggttaggtcgcgatagttcagcgacgcagcttggagcttcaccaagacttcattttcaccgggtttgggaacaggaacatccttgcaaacaagaccgtcgaagtcatgtttgtcatcttcaacaatccattgtttcatagtggaagaaggcattgtactaaaatgtatcaatatattcaaaaaagtatactacgtatgacaaaatgagtatgggggttgggggtttatattgaagccctctgacgtatttgacgtatcggcagatgcatccgtccgatttcagtgaccttatgacgaaaggattattaagaaggtggatatctgcttcatgtttattggtagccaagagctcctatacaggttttatgatgtgaattattaactgataggagatattacctttcgaaccttgggatatatatcaaatcacaaggttgagtagggaaatatgtaattcggtgactcggctgctgcggatcatatatccgctaataaacaggtgatcttctcacagcataatggccttgttagatgcactgggattccatgtaggtggtttaatccggcgaacatggtggcataggcgtatccagggagaagagcaaagagaatgagactaaaaggatttgatattcaaagacggaaggatagcaagaaatgaggattgttctccagggatgaagaaggtaaaaatataggatgaaggacaagaaggggataactatatgtatgacaactcaaatcgggcatataacttcccgtcaaaagtccggggtcccggcccctcaccagaacatccttcaactatgaaacgcaaaaccctgtcatacaagctgaattaagagactatcttcctctgacatatttttgaactatgccgtccgtgaaagaaggccgagtcgagaaatttaaagccaaaacaccgcgaaccacaacccgacgcgtgtccagcaaaagtgagtaaatacaccactgtcacaagcatatttcatcctcaaaacatgttttattgatttgctttaaccaaatggcgacgcgtgctaataatcccttagtcccactggttgaacagaccaacgcattatctattagcgacttcgtcgcccaatacgtgactccaccgacgcaagtaggagattcagctgaaaatgatgcgattgatcaactacatccatctcaagatcagccacagcaggatatgatccccatgtcgcgcatggatgtctactctgcggcaactatccccgcggctgatctggaagcatgtctggatctgatcgagcaaacctcaagtcaagcctacatggcgtcgaacgcaggctggtcacgtaccaagaagcggaaggagatgaagttgccagatatgaagtatttgattttgcgggacgcgccgaatgataatagtgatcctagtgggcgagttccgagagagaagcagcgggatattgccgacaacaatgctccgtctccacccccgaaggaacgcgaggaacctatttcatcgcctgatactgtttctgggaacgtgcttggctttttatcatttatggtcacatacgaggacggaaaagaggttgtttactgctacgagattcacttgtcgccgacggcccggggacggggcgtcgggaggttgcttatgggtcggatggaggcgatcgctggtgctgtcggcttggagaagtctatgctgacggttttcaagtcgaatgaaattgctcggcggttctatgagcggcttggttatgaggttgatgagtattcgccccgaccgcgcaagttgcgcaacgggactataaaggatgttgactatttgatcttgtcgaaaattttgaaattatagtagctggatatctctttgttaagggtttgaatgctaatagtggatatgaggatagtggcgtgcatacactacacctgtcgcacctctgtgcccacttgctctgggtgttcttgctcccactcgtctctgagagcggcaaagatggtgtcggccaggaggatggagaggcccaaactccagactagagtgatggcgtagaagaaattggcatttccggatcctgcgtagatccaaaggtggtagaaagccggaccgagaagactggagtacaagattgccgagcccgcaaagaaggtataacgcatcactgtaccaaattagtcaagttgatcctgagatatgctcaattattggaaatactcacatgggaaaaggtggcgatataatggtagcaatgcgaagaacagtgatgcatctgagatgctagggtaaggcttgaacacggcgaagacacccaatagcgaggtaatcacgaataatggctgacttcggaagcgagcagtgagacccccgacatagctggccaaatgaagccagaaaacgccgaggaagaactctcgaaatgagtcgaacatctcaataaaaaagtaccaccacagccccacgttcggagtcaagtctggaaccaaaagatggaaaccatatgttgccgagataaactcccaaaagttgccggtgatcagacaggataggccaagcaggcctgccacactggctagcagtaggatagcatgttggataatgaacgatccagcactgggtgggctaggtccctccaaccgccggtcatagcatagcaagaccaacgggataaatagcagcgccgggtacagagacaggtatgaagcaaatccaagggctagcatcgcattgatgctatttccgccgactgcattggagatggcgaagaggattccggatgtcgtaaatacgctggttgaccgcgctaaacatgtcgcaatagtaaggggattgaacaagaacctatccgtcgtaagcatgtagatatacatatgatggggaagccagagatttataccatgctgcaacggacactccatcccatcgaacatgttttcggactgctgagtgtagtctcgatttgactgactggcccgacgcagatatagtcatcaatgcgtacgcgttcatgaggtcgacaaggaagtagaaaattgctgttggcaagggccagctcttcgcatccgggagtagggcaaacagaggtaacaggagcggtgcctagatcatcaaattgtcaattcaaggaacggagtcgcagggatctagttccacgaacctggtggaagacgccaccatcataaggcgacacatttcttgtgtacaagaaaaggccttcttgcactacatgcaattagtttacagaatgcggagtcaataatcggagacacgtacggcgtttgaagctattaacaggtgttgagacttcgactctccccgttaacaaatcaggcaatgaaggaaaaagacatgtaagaagcagacgcagcacgaaagctgcgccaaatacagcaatcttccgtcggtctacagccatgacggggtgagggtttggttgttgattccagctggtccccatggagccaacgctctccgccttcgggcacgggccactttgttgcggtaagaaaaaaaagttatcgagaaattttcttcttcttatcagcagcccgtttagatcttttgacaaccacttttcatcatgggcaaagttaagaagaagggtatgttgaaatgaaccggcaatttcaattgaatctactgaccgtccttgcaggtacctctggcgcagccaagaactacattaccagaactcaggccgtgcgcaaacttcagatctctttgccagattttcgccgactatgcatcttcaagggtaattgcctcttctatcggtctttcatctgaatcgcaagactaacatgaattccgatatcaggtatctaccctcgcgagccccgtagtaagaagaaggcctctaagacctctacgcccaacaccaccttctattacaccaaggacatccagtatctgctacatgagccgctgctcaacaagttccgtgaccagaaggcacttgcgaagaagattgctcgctctctcggccgtggagaagtcagcgatgcctcccgcttagagaagaataacgctccgaagctcaccttggaccatgtcattaaagagcgctacccgacctttatcgatgctctccgtgatcttgatgacgctctgtctcttctcttcctctttgctacccttccctccaccgaccatgttccttctaagaccgttgcgctctgtcagcgcctttgccatgagttccagcactacctgatcatgacaaattctctgcgcagatccttcctttctattaagggcatctactaccaggctacgatccagggccaagacattatgtggcttgtgccataccgtttcgttcagcgtgtcaatggcgacgtcgattaccgtatcatggctacttttgtcgagttttacaccaccctgctgggcttcgtcaacttccgcctatactcctcaattggattgagatacccccctaagttcgatacccgcagtgacgagaacggtgccgagttggcggctttcactcttgagggccggacagtcggtcaggtgcccaaggctattgaggctagcaaggctcagagcaacggcaactctaacaaggaagtttccaaggaactccaagccaaggttgacaaggtaattaagaaggccagtttggaccagaacacggatgaggagatggtcgacactaccgacgaggcaaccgatgccatcgaccactttgagcccgctgctcctgaagctgacaccctcccccaacctgcgatgagcggcaacgaggccggtgcactcttcgccccctttgtgttctacatttcccgtgaagcgcctaaagcccctctcgagttcattctccgctcattcggctgcaagcgtgttggatgggcctccgttctgggtgatggagctttcactaatgacgagaccgaccctcgcatcactcaccaaatcgtcgatcgcccccaacttccccagggatctcttcccgccattcctgctgccgatgagaacgctgtccagaaggtccagcctggaacccgcattcctggccgtacctacgtccagccccagtgggtctgggactgcattaacgagggtaagctcctccgagctgatctctacgcacccggtgccactctcccaccccacttgagcccttgggtcaaggctactcgcggcgcttacgacccgcgcgccacccttgccgatcaggaggaggaggatgaagccgagattgccgccgaggcctctgatagcgatgaggagatggaggacgagcccgcggctgacgctaagcctgctactgctgaagagtccgaggaagagtctgtcgatggaggcatggatgtcgccggcactgacgacgagagcgaggaggagtctgaggaggaagtcgaagacttcggcggctttgaagaggaagccgcatccgagtccgaagacgacgatgaggctgcccgcactcggcaccagaaggagctcgaggccgaagccgctggtctgcctttcaccgccaacgccgccgctgatgaagctgccaagaagaagtcttccaagtccaagaaggtcgctgcgaagaagcgtagcgaggacgaggagcttgagagacagaagatgatgatgagtcggaagaagcgcaagctgcttgagaagatgatgtactccaacaagaagactgctgatgagtccgccaagctccgctccaagagacgcaagcttgagaagggcgagaagggcgagaagaaataaagctcggatcatttgtgcatgttagatagtgcttttgccgggcgttgcggtttggatatgtcccatgtataggcacctcaaaaattttgtgaagttttaatgctatttacgggatgacaccccagttatatgtatacctttgcccctgccatattggaacaacacgtttatcgtaaccctaggctgtgacctcggaagtaaatggtctttgaaatttgcgtgtgcttttcccatgttgccatccacgcgaacacgcacaactcgattttggaaatggaattcaggtcgcttgctttaaagattgatagaaaagtcccgtgtcgtagccatgatatagatgcagatgctgttgcacccacacgtgaagaataccatgatgtcgaaggtcgacagtaaaacgggctgcgatcgttgacttttgtgggatttcctagtcatgttttatagcaggttttcgttccttctgctgagaatattttctaggtcaatcaccttggtccgccctgaatctcggtatcaaggatgttcagcatggcatcagttgcgcccaaggtagcgatgcgagattaaaagtggccgaggtggtactggacaatatagtacgagcgaagggcttttcgaatgcgtatggcggccggccttagattcatcgtctgggtacggtatcgtacgtctggattctgggcctagactttgagaatacctttgtgaaggaacgagattgaaaagacggttcgtccgaataatacatttacacccaggctcggagaggacgtatgaaggccctcgggatcacttacaaagggtggaatatccaagacgaagcaaactgacccgcaggatatcttcttattcgtcaaaagtcaccattcggaaactccccgcggttggtgtcaaggttgcggctgatatttcctaatttggaaggaaggtccgattaagctcccgaggtcggatataaggctcggggcctactcttgccgatcaacaaattcaggacgatgaaaatattcatcagattcatagctatcgttttcctcactgtaatcactctcttgtacctctccattcggtcacaaactcaccggccaaccgtcaccgaaatgtctttccggttacatctcgttcggcacgcagaggggatacacaaccccggccacgacacaaccattctcgatcctccattgacagaaaaggggatcgcacaatgcctgaaactctgcgaagactttccgttcaaggagagtgttggcctagtaatgacatctccgctccgacgcactcttcaaacagcacgtctgggcttccaacaaaccatcgatgagaagttttacgcccaaggctccggggcaggagttcaaaatggagcaacccttttgttagagccagatgtgcaagcacactccgctcggccatgtgacactggttcagatatcgcgattttacgttcggagttttacgatctcccatgggaaatcttggatttagatcccacattcccagcaaaggaggggctttatgccagtgatccggagagcttgagtctgcgcggagcacgaattcagcgtcgattggagcagaaattcaaagaactgaaggacagcaaaagacctgacattgtcgttgttacacatggcgggtttttgagctccgtcatcggtcaggagaaaacagaagtcggacaagcaaggtggaagacgttcatggtgacattcgatcaggattcgagaattgattcgagaattcttgtggaatcagagtgagaatgtccaagtcgttgattccgttggtgcatgaaatagaccgaacctgtgcttttccgcttagatttctttttctctttgtaactatcatatcggatgagaaataattcaccatgtccaaacagcagaaatgtcgaaataaatttccgaagtccgcatcagccctatctccgagtctaaaccacgatctacaaccccacatttatacccgacaggttccaaggttacctcctgctaagatttcgaagttaccatccgtggagatctgaggatttgatgtccgaaactcgtggtttttgcaagaatcaattactggtagaaaaaaagacaaattcgatgctagtgctcgccgtgtcacgatctttaaaaccctcttcgatgaccttcatggatttatgttggtaacaacagcagtcaggcatgggaaagtgccggagagctcagccgcaacctcagcccgccagcacctggcgctggctctcgtgttcaatgtgagcttttagtgctgagcaatctgtgaaacctttcgtgacgcctactttccaaatgtagtggacaacataggtcggtctattttgtgtgaatatatatattgtggctacagaattgccgatttttggaaactaaagagcaatcaatatcctttcgctgtactacatgcgaaacaggctgggctgggctgatattggcacttcgctgactccggttggtcatgtctcacggttccatcgatatttcatctcaccagtcgttatcaataatacttcgaatgtaatccattgtcgctctgtaatctatgtggcaaactgagaatctgatgctgttacaaattctagggcgtcgaacctagaaaagcactgtccaggaatgccgactaaagcaatctgaattcttcttgtcgaggtgctcatttcctgtagtagtatatctcgatccgattttttaagctgaggcctcctctcatacagacctctgtcccaggccggtatctcggcgaagtgtttaccagttcacgccgaggtccaatatttcttctcgttgagcatagaatgcaaccatataatacatatgtagctgcaagtggcaagtttgaaatatcattctgcctcttttaattattattccatggattcgacgcccctggcatggcaaatggcgtggttagggttactctaggaagtatgcagagtctacccttgttccaggccctattccagacgctcttctgacggtcaaactatcatgaagcaaggcaaggatgttgagtattcgttgaatatacaggcactaaaccaataattgtaaggtaataagttgttgtcctgctgacgggtgccattaaccgaaggattctatcaaaatacccacgatgaatggattatttgcaggtaaacaattccatataacgttcaggtaaacaccctcaaacctatggctaataattatatatatagccacctatatgtaggtcgcaccttccaaggttccatccccgcattccatattagtacagggacaacttttgatttcgagtaacattggaagagccctggaaaaaccatcttcccctgagaccattgtatttctaaaattgtcccgttcgaaatgcgtttgagcattattactgtcgtgggcctcgcaatcgcccctgtgttagctaattgcccttatgcccgagatgcgggttccgaggttgacaacagtgctaaccttcatgctcacttgcctcgcgatgccactcgaagcaagccaaccacaggtgttgcatctcctctcccttccgcagcagctgggaaaaaaggtctgctgttgatgaaccgcattgcccccggtacctcagaattatacatcgccaacgcggacggcaccaacgagcgtcctctgttgaaagatcccggttatgaatatcacgctgagttttctcccgacggtgaatggattagcttcactagtgagcgtgacggtgatggaaactccgatatctggagagtgcacccagatggctccgatctacagccgattgtgaaatccccagcagcggaagacagcgttgtcatctcacccaatggaacattagcagcatatgtttcaactgctaacaagtacaacgctaatatttgggttaagaacttggagaccggtgccgagtggaacatcaccgataccccggctaaccgaccagatgaggacatgatgcacgggcactttcgtccagcctggtcaccagacggagattggcttgcattttcctcagatcgcaacacaatatgggatggccacggaaaacctacgtatcttggcctcgctggctgggagcatacccaagaactcggcatttatattattcgccccgatggttcagatctgcgccttgtcgcccaccgtgcttcccactgccttgggtctcccaaatggtcacctgatggcaagcgcctcatattctacgagatgactcgtaatgggacgtgggatgcacatagacctgagctcgtggcagatggtaactccacaattgtgtctattgggatcaatggcaatgaccgtcgaaccgaggttggcggtcctggtatcaagacctttccccagtacgtgaccaactccaccattgggtaccatctgaagggcggcgataaggagggcttgtatctcacaaacggtacttacgtcaacaccactattcgctctccctcatggtctactgatggaaagtatgtggtttacgagaaagctgtttggtctatccgccctctcttcaaggagctttacagctgggatagcgaatgggattaccgcttcactgatatattccctcaattatcgtcgaacgaccgcgtggctatgactgaaaagcaacttggcaactcctccattgcaacctttgatctagaggatagacatgcctccttggtatataagcctaatgatacgagtctaatcgacactactctaattggagaaggcctggccggggcctacaatcccagctggtctccagacggcgagtggattgtcttcggagtaggtgcctggtttgaggcgcgtgattggcgaggaggctggattttacgctccaccgcaaacggcagccacaccgaggtcctcaccaccagcaagctctttatcaatcaaaccaagtacctcaacaccggctttcccagcttctcgcacgatggcaagaaggtcgtctaccgcgtgtggggtgccgagaccgccaagtacggcgacgaaacagagattggtttacgcatgatcgacattgagaccagagagattacccagcttaccagcggctgggataaccttccctctttctcgcccgatggtgaatttatagtgtttacccgcaaggtttctccgaccaactacgacgtctgcatcatccgccctgacggtactgatttccgcattctgacttccagcggcgccaacgatgcccacgctgtttggcgccaggatggaaaaattatgtggtcctccggcatgtatggattccagtatgagtgcgctttgtatgaggagactttccagccctacggtcagatcatgatcatggatcccgatggatccaataagcgtgctttgactaattccatttgggaggattccatgccgctctttcttcctaacgattggttctagaatgcggcttgaaaatgtaaagtagggtggcttcgccttgttctctcattgatcatgtccctttccattcgctttggataattaaatagagccgtctgtctatattactatgaaaattttatcattactctcttcaagatgattgtacgtctgtctgttccacgttccattgaacgaaatatagataaaagtcaggagaatggtgtaacttaatcctttgcgagaacctaaccctgagggcgctgaaaaatagatcagcccggacgtatatctgttcgtagaggggctaagttacagaccacatgttgttttttggacgcaaaccgcgctcactactacctacatatgttccagggtagcacaccagcctcttcagagaaattcatccttatctacttatagaacttgaccgaggataaatggccggtcgctaaactgtgataactctcagaaatcagattagaaccatacactactattttgggactagcgtacatattctgtaatatatcgatcacgtgactgtgccgatgatccactcgatttttgacatcttcaaccaggaacaatcgaactgtcggacaggagacccaaaattcaccattcagagtctcggttacagagggttgggacagtggttgttcctttgacctttagtcggatgttgcctaataaaaatccgcatctatgtgacatctaggcactccagatccgaacctttcgcccataagagaccaaagtttcttcccgtcatgtcatctttatatgggagccagtctacttggccagaaaatattccaccacaatctgcacagccgcaccgatcattatttggaggcccaagcagtgatgtcttgcaaccttcttctcagctagaaccgccaagaagttctctttttggaggaggccccatcgaacaagatgcccctctagagcccttttccgaagcagatcttatggatgaggagctagaccaaaacgaaaatgaaattgacgtgataatgcaagagcagcccttggcgttacagaatgactctgatgacgaaagccagggaaataatcgtggcagaagtcgcatacactcaaaaagggcacaggagtctccacttgacccaatctactacgtagttgatcgaggtcttgacctgccacctggagttgagcgtcctaatctatttgacgggcacgccacttcgtggaggaactacaacgccgatgacatcggagcctataatgcaattgttaccaaccgaaccagagatttggcagctcatctttacaatgctcacgtggttcgcaagcgagcgcaggacactgcccgggagaatcccggggtcgacaaagtgccattgcgtgtgaacaaacgatgggctgcatggcctgttcatgcagccacagttccccgtgccaacgagatcattcagagggtaatggatgcctctgataattttcagatgcaacccgatccccgacctagtgccggattggaagaatgcatcacagcgttcatactgaagacctccaaggagaccttccaagcccgagaatgggattcggaagaaattaaacataattctcggaataaaatgaacgacgggaaggaactgatggaagatgaattggggaaaaatgaagagaacgaagaagcgcgtgttgatgtaagaaccctccgaccgacagtcctcctcgacgacgacacagccattcgccaattacgtccgttggtccgcaatgtgatatcgcaagttgaccggctgctatacgggctccattgcgcgatgaagggtcgcaagttcgaggaagaatctggtgaagagcaatggagtgattcggacggagaccatcagacccgacacagccgcaaactcagaagcaggagtcgatcacgtggtcggagaagtgctcgacaggagtctcagaagcgaaacatatcacgtccttccaacagtgcacatatatccactagaccggagacaaaggatgaaaatctgccaaacgtttcccatacccgagcacaatctcgtggtttctctactggccacgagagcagtcatcacatcaatggccgactcaaactgcgagactggagtgaagttatgggactggcatcaatgattggcctcccaagctccgcggtaatgcgtgcgtcaaagcgatgcgccgaccttttcggtgaagatatggaattccgaataatgcccgaaggccgggtaagaaaaagaaaaaaggtagatgctcgagaagaatatgcctacaccgagagcgcgagcgatagtgactcgaagccactaagtgttcagccaattcctcggccagtcggccagccaacccgcaaacgcaaaaccgaccctgggctcggacccaaagcccaagcgaagattccaggccagcgacggtcgaagtcacacatgacccctgcaattgttccttcctcgtccccagccccggaagagccaacagaatctagagaggctattgcagaaaacacaagacgagccatcgctcaggggtcaaggacggttaaaccaggtgttggaaagggccctcatcgaaaattggatattgtctgtcatttcaggtcttgcaatcgacatacgaatgggttttcgcgaaaatggaacctcaaccaacatttgaaaaaagctcatggtataaatgttgctcctgggaatgaacgttcgattgagcgggatgctacggtcattgtgctcgattaggtattccattttaattagcaagctcgaaatcgcacaatctgtattagcgtccataaattagtgccggcttgatgaagacgctttgaattctgcatttcggactggtgtagaaaaacaattccagctcctgattagtgagctagagagggctagttacaatgctacgtcctgttataaaagacgcagaatgaaggaaaaggtcttgattatggtgccgtcaatgaatgtactcgatgcttttctttccttttttcaatagctaaacctcacggccaagacatgtatggcttcggtcctttgtttgaattcttcttttcttttccctcttgataaccaaatgactgactgaatcaagaaattgccttgcatacttcagatgtaccatgagtcaagaccttgttgcctatactgataggcttggttttgttgcggaatcggaggccattcgtctttccggtacttttggttgcatctcgattcgctgatagaagcagagacgaccaccgaaaggcaaggtctttgcgctccaagtagcggtccatccgtggaagggcaagtcctaaccagagcattctttcattatcccagaagcttacaccaaacctctggaattctccgcggaagccggcgattttgacaccggactgaggcaccgctgagcaattctgtgcaaagaagcaacctgggaggtggatgtgttggagattatccaagccacgcgagcgttggcagtcgctcagcgaggtaaatttcgggcaacatattgtaaaatttgctgcccgcttgcgtgatttgttttcgtgcatccaagacagcacagtctctagctgttctatcggctctgttctcatccaaccgtaacaggcaaaggtcctccagaaatcaatcaacaaattcccctgtagatacatcaacgtgtgcgggaacttcgtacctgggggaggagaattggtatttagtagcctcttctcgcagacgattcgtcgcagtactgagaagatgtatggtttcaagaaggcttgcatcagtcgctgttcctccaaccaggtgggaggataccctccctccctggtgccgatgtgaaccggaatcccgggaggtcgagtcccgttttttggccacggcgacttccgattctcgagcttctgtatatcggcagacaagcacagagtcatagcatcgtggaagaaggcgtgtgcatccccgcgaatgcggcttgtgaggcttagaagataacgaagaatctttggaggagttgagtgcggaagtcgaatgcagccgaccttgattggctcactgaagccctctcttgctatgttaatgctgtagaccaattcatcgtgaaaactgacgggtaatggattatcatccgaaggaatccccgaagccacggactcttctttccaccaaagatagaccaatgtccgaaagaacacacgggtatcttcgcttagaccccgctcatggtcccactgatcgatgattctttcaactagctttggaaagaatccaattttgtgattgagatagtcggaaacagcaggtgaagcttggcacaattgatgcaaagttggtaagtctggcaggtgaaggagaagctcttcgagaccgaaccatggaagacgtccgaatggatccttggtctctgggtttggatcgagagaacaccgaagagagaacgaggaacagagctttgaacccactgaaagcgagggcggacaatcatcgcatctatcgtccctagtggcaggactcctgatgtgctgaatctcatcagggagagtagagttagcgtgctggagatttgaagtcatgatgctcgattccggaggatatggggcaaaagagatgaaagggccgaggccctagcttatacccagcgaatgaatagatgccgagaatctgatgaggtgtgttgtagtatgtattctcaaaggcactaaccttcaagccaagcaacgtaaagatctgttttgggttaaactgggttcaaaccaggattgtggagcttggtccaatggcataaaaggtgctggataaagtggtgaagaagggatatgatgatgaaaaggatgaagtagtgaaatgaagaaggttaatggtaaagatgggtagggtgaagaaggaaaatggtgtattattgtcgattggtctcgcgaggtccaatgattccttccaaggcggtacgagagtgttggtttcatgtttcctattcagatacttatagaagttattgcctaggggaccacagtcagaatctcatctgctacatccaacggctttcttagggcaaggcatcctaaaacggccaagaccaaaacgaaaggcttggctaagatggaaggaaaatcagtagagtcctgttagcatgcaattacctacttatacatagtagatgaggccaaatgtgtgtcagatagtttcatatcgcgagtgagtagtccttggatctcgccagaccgtaacctattggcatcctagggtatccatactgctcctatcagagctatagtgctttgacagtaagtttattcagaagggtacttatattagaggatagtatgtacttactatgacccttctcccttcgagggtaagtcgtggatgagctcggggtattacacatacactatctcaaggccggaggttcattttctattttgattggctacaaaccccgtattttatcacagctcaaattctcattggctcatattaccgagtcctgtaataccgatttccaaattaccgaaattaccagatctatgaaatgaaccattctctacagaaagaggtttctctatttcattcaatttttccttaatcgaacttgaaaaaagacaatacaaaatgcaacagaacatcaagcaaaacaaaagaaacaataacaacagccacaacaatcacagccgttgatctatgccgttatgtgcagaatgacatcaactccgcagatctccgcttgaagctatggagcttcgaagattaccagaatcgcattctttagcacattaccattacacatattcggtgcttctcggacgcagagagcaatcaccattgagctaacccccactagaattgctgaattgctgaattgctgaattgctccctttaaaggcatctccaactctcctactcccccgcaattttctccatcttcccgtgtgatttctctcttcaaggcccaacctcaccttgatttataatggaccgcatcatccgccctgtcgctcgccaattattgagaccccgaccgagatatcctttttcaattcctccgacagctcacgcacagagattatacagcatgaaacacggcgcgccgcaggtaagatctgtagtcgaatgtgatttccatagttcgtactgatcgattacagttgaaagaccagtcgcttttcattcagaaggcgtacattaatggcgagtgggtcgatgcgaagtccggcaagactttcgatgtctacggtaggtaccaaattgaatattcgggttcaaggtggtcgctgacttttcgtcctattcagacccagcgactggaaaattgatcggaacttgccccgagctcgatacctccgatgttgagaaggcgattcaggccgcttccgaggccttccccaaattccgcacaacgctaggccgcgagcgcgcgcgcatgctgcgccgctggtatgatttgttggtcgcgaatgcggatgatcttgctaagctgattacatgggagaacggaaagcccctggcggacgcgaagggcgaggtcaactacgccgccagcttcttcgagtggttcagtgaggaggcaccccgcacatacggcgacacaatccccgcttccatccccggaaaccgggtcatgactgttaagcagcctgttggtgtgtgtggtttgattacgccatggaacttccccgcggcgatgattacccggaagattggccctgccctagcggcgggctgcacggtcgtggccaagtctccccaggagacgcccttcacagcgaacgcgatcgctgagcttgcgcaccgggctggcatccccaagggtgttgtcaactttgttacctcctcgaagaacaccccggcggtgggtgagctccttaccacccaccccgaggtgcgtaaagtgtcattcaccggctctaccaacgttggccgcatcctcgggaagcaggctgcgtctacaattaagaaggtctcctgggagctcggcggtaatgcgccattcatcgttttcgacgacgtcgatgacctcgacgctgccgtgaccggcgccatcaactccaagttccgcagctctggtcagacctgcgtgtgcgctaaccggatctatatccaagaaggtgtttatgaggagtttaccaagcgctttgtcgagaaggttaaggacttcaagctcggtggtggtttcgatgccggtatcacccacggacctgtcattcacgagcgcgccgccaacaaggcccatgaacatgtgctggatgctgtttccaaaggcgccaaggttgttattggtggtcagagggctaccgcgctcggacctaacttctaccaccccactgttctgaccggcatgaccaaggatatgcttctcgcttgcgaggagactttcggccccgtggctggtcttttccccttcaagaccgagaaggaggttgttgagctggctaaccatgccgaggtcggtcttgctggttacttcttcagtggtaatgttcgccgcatcttccgcgttgccgaagccctagaggttggcatggttggtgtcaacactggtttgattagtgacgttgcctctccgtaagttaaaatctcccacattgctatatcaggctctaacctttctacagattcggtggtgtcaagcagagtggcttcggccgtgagggcagcaagtatggtattgatgagttcatgactatcaagacgataacttttggtggcatgagtctgcctctgcaggagtaaaaattggatacgaatgatttatttgcaaactatatattatgccttaagatgaataaaatctaccatggattcatatgaacattttgctcttctacacaatcatacttgctttacaaatattatatcctgcatatatacttcaaagattgcggtcgtgccattgagtcttccgtcatatagtgatcacctgaccgtgaacacaatgcggcagaaatatccactgcctcgccgccttctgtatcccttcccctacaacaagctaataattggcatctctatcatcagaaagaaaaagctttgacgggagcagttttttttttttttttctaaatgaggtcatggtttgatctactccaatgcgttcctcacttcgtttcctcgcggcggtctcacacacccggccctccaagctgaagaaaccttctatcagtctagaccatgtaagtaactcaagcttgggttgaagtatatgtactaattgaatcatacagtttatccagagacagcgggtgttgtcattctggcgggaaatcatgcgagcattaataagtgtgcccaccgttccagtttctagaagccatgtatgacactaacagacatgctcagaggtgccaccttcgtcaacacggactgagctacacagatatgcacgtgatgaattcgaacgccatcgaaatgtatcggatctggtaagttgatttcggatgttttctatggcaaggttcagatctgagaatacttgactgacctttcttcagcaacacataagatacttgctttcggtatgaaattttggtgttatactataatattatagattgctaatgagattaaagacaggcaaatcagagttcgagacgatgaggcggtatattgacgaacagatcgctggttgacctgtgttaggaatgtgtatattatggtgtcaaatcaactcaaggcatgtattgccgagctaccgagctaagagtgcataccgttgaagaacggttgatattagagggtcgacctctatagttgacaaggcagttctcggtcgaaaggagcttccctgttgcgttccaatagaacgggtgggatgtggtgggatgtggtggggagaacttccgagggtctctccacatcaagacattcacgtcgatataggagtctctaaacattgacggagattgtacggagccgggtctgatgaaggttacgtcttcaattctcgaatatagacattgtattctgctacattgtcctctccaaacaccccgagtgtatttcaacctcatgtggctgaggcctagactattggatggcaggcacaaccggaaacggctgccaggttacagctgtctagaagcttgctttcatattttcaatcctgcccagatccttaacatacagagtgtagtacgtcattgattttggtccaggctcttttatatatttgggagtccaaggttgcggcgtgttcatcgaatttctactacattgtgtagattcttgaaattacacccctcaattataatttacattctaaaggtattcactattaattcaagtcctttatcacctccaatacctccctaggagaccaaaaccatgaaatccgtctcatccgcctcatcctcccaatccgtcagccctcggcgggcaaagcacctggaacgaaaccgcgtcgccgccaacaaatgccgcgaaagaaagaagagggaacataagcaaatcgagcgtcggctcacccacgaaaccgaaaagaaagacatcctcatagcacagttgaattgcctacgagaagaactgtgggatttgaaaaacctcgttttccagcacgccgagtgccaagaccacgaaatcaaccaccagctcgccaggatgacccagaccgtcctgcaaacccattccaacccggatgtcggtccttccttgcccaccggctcatcgccgacattctcgactgggacgtggtccgatgagtcggtcgcagataacgccaaccctaccggaccgggcgcgtacaataacgattggacaatgttgcctgcaatcccgaccgaatttgcgccgtacgagccgaatggctttactgattccatgtttgagaactttatcgatacggacaatgggtttacttgaagaaataagcttccgttggttggctgttctctcttttctgcttagcgatggctgtatattaatctcagggctgcaaccccagaaaagcccgtaccaaaactcatattgggaacttttcatagttacgaaacaacgaatctacgaatcagtctatgacatggagacctatttccgcataaacattcctaaaaataggcctcatgttcctgcacaagcctaagccctggaattcccgaaactggtcgggtcacacggggtagatacgaagatccaccgtgcaatgcaatgcaaagcgaatgatcgcgaatcatcgcgaatgatcatgattcttctgtttcttgtctgcatgtgctggattatgtggggagatccacaaagcctctgatgtcactacccgagcacttgtgacggcatcgaacggttagtatacattggatttctatttattctgaagattcctttcgattcatataattcatactattcatatcatactttgttacatgtttctctcgctgatccctgtattatagccattatttacttctatattctcctcaatgatgcctacaggcttacctacgccaccttacggggagcgaatggcaaccttttcccagaaatcagtaatgggtacactatttgagacaactgaacggttagaaaaaaccaaagccgctgatatttgggcgagatcttgtatgctaagactatacgaaccagctacacagaatggaaacctcttggacttggggtatctgggcttgtctggtattatttcctggagcagttctatcaccagccagaactaacatttaattacatagctctgcaagagatcagcttgctcatcggactgtcgctgtgaagaaactctcggaacctttcaagacaccggctattgcaagacacatgtttcgagaaatgaaactactgcgacagttgcgacatgaaaacgtgagaattgccttgcgcagtatggaacggctgtctaattgcccgctagatcatcaacctgaccgatatctttatttctccctcagaagacatgtatgaagagacctctctccttacatgggaaagtactaattactctagatacattgtgaccgaactcatggcaacagaccttgatacaatattgaaggcgaaaagagtcgaagatcaattcgcccaatacttcatgtatcaaataatggttagtatcatctaccaacccccgcccagaacgcacgtgttcctaacaacaattccagcgtggcctgaaatatctccattcagccggtgtcatccacagagatctaaaaccaagcaacattctggtaaacgagaactgtgacctgaaaatatgtgacttcggcctggcccggatccaagagtcacacatgaccggctatgtctcgacgaggtactaccgtgctcccgagataatgctcacatggcgaaagtataatgaaaaagtcgacatctggagtgccgggtgcatcttcgcggaattacttctgggggagcctttgttccctggaaagaaccatatcaaccagttctgtgttatcaccgatctccttgggagcccccctgaagaagtcatcaacaatatcacaagtgaaaatgtgagcgaggtcatactctgaaattatattatacccaccgaaaggggttttctgattacttttccattttctgcagacgttgaactttatcaactcactcccaaagcgagcccgcactccaatatcacagctcattcccaaggcgaatgtaaatggtatgtttcaagctatcgctttccttgaaagcctcaattatacatctgaaccagaaagaaagaaagaaagcaaaaaatactaaccaaatcagcggcggaattaatcgatcaaatgcttcaattggaccctcaagtacgaatctccgcagcagaagccctctcatccccatatctcgcaccataccacgaccccaatgacgaaccagtcgctgcggaaacattcgactgggccttcctcgaagcagaactcccagccgatatctggaagaccatcatgtcagtagtcaatcctaaatgcagtacatgccaacatctctccggacattctgctgattatttctagctacggcgaggtgctgggattccatgcagaaatgaaccagactggccagagtgggccaatgaaatcgataaaccaggtggacgggatggatatcggttaaaatttaacgctagagtagattcatgatgaagatttccatttttgggtatgattgcttttaacggtgttgtaaactgagctgcaccgcccggataaggagagaaatggagtaaggacagattatcgtattaatattgggttgatacatgaccagaccatttctggtatatcaagatcatataaacaggggcagacatatgttcgtcaaatcaactaagtggggtatcgctttcatataggaaacccaaccgcgtgcgtatcatagcttgcaagatgtgcaagtgccgttagtacctaaacatatcctcaggggatacctagacagccccatcggcagtggcggtagtggtagtattgccgttggtattcgcatcagcagcactcatctccggggaagcatcatcacggtgattcttcgcgttgcggcgagagttcttaaggtctatgatggcgaaggtatttgtgacaacgaaagtagccctgctcagaaccacaggttagataatgtatgcatgcgtcaatccttaggcatctgttttaccattgcacggccccgacgacaatcaaagcctggagggcgtggcagctggaatagtggcatgcgccaggcgagggaatcattgcagccaaggcgatccagccgctgagccagaggccgccggtgagcagctctatgagaggaattgcgatttcatgcgagaagcgagggaagcgtaggggtgcgaggcccaggtatgggactgcgatggctgttgtccagcagccgttgaagagcatgtagtagactacattcgagtaggaccatttgtcgtacagagaggcaatttctagatggagtcagtgctgtcatggagtactttgtggatagtcaaacataccatatgcggtaagaccaatcgtggctagggacaggatggcctgcacgattcgcaatgggttgatccaggaaagcattttgaatgtggaaatggttctttttgttgagtatagcgtacaggtgggtagtcgatttgacaggggtatggaggaaaggattaggaaacgagaagatctacagtcgtaagggaatatcatgggcttttatactcgtgagagacggcctataaggcgactagcttgtgttccacacgtcatggtactgtgattcggaaaagaatgtgccttgggaaagtcttgaaagagttaggctgcatgaggggtggagtctcggggtaactgaaaagtttgacccagggtcattctgatagaccctggagctttccaaattagggtttggtgttggctcaacttccccgcattctaggtttctatcatgcgcaccatattagtcttcaggatgagaagcgttcatcttagactctttcatactctaagaattcaatactatttcaaaaccactcccttgacggcactcccgttccgaataagcactgattatgttaggttgccgcacgctagctttgtcgatctcacatgaaagcctcggccaaggaaacaaactcggccatgctgatccaaaatcaacgtgctgtttcgtaaattccagatgctgccaaaaaggtggtttaccatctgctagtggcgtgattgtttgggatcaattgagatatttcaacctcggtacgtcgatcatcatccccgtacacagtacgaccccagacgagccaatcgtacttctgtcactcatgcttatggattctagaacggcataattcatcagttgagaatccacatactatcggagaatttggatgcatatgtacaaaaataaaaaagaacctctcctatcttacaaagcgcacgccatcagttccgcgagataagagccctgacggcatccataaccccaatagacttctcatccgcaggctcgatcgatgaccgtgccgcttcagactcagaacgaggcgccggtttattcccggcctccttggccgcagcgtcaatggcagcgtgacgctccctccactcgcgatcctccttatcacgaatctctagctcgcgcaaccacgcatcacgcttttcttgcttcttccgaagttccactgcttggtcgaattcccggcgctgttgccgctccgtcttgaagtacattccgccggcgactagggcgactagtgtgaaggcttgtgcgtagatacgggctcggaacattcggttcatttcaaccgagtcaccgattttcatcgaccggtaggcgcggtagagggcatagcatgttgcggcgcatcctgtggcagtatgtattagttttggttttcaatgttgggagggaaattccaaagtcaagatgagggcttgtgcagatggatttcgtaccaagtggaaccaggggttcttccttgagacgtcgtttgaatttttgaacgccggtctcttctgtaaattgactgtccgagaccgagtgttagcagacgagccttcccttcgcttcctctgcggcattgtcgggttccgcttgcggagcacgcggctaatgtgtgatacatacgggttctcctcgtcaaaagacgaaggaacaggttcccggttcatcgtgaagttgatcgtggtcgggtatgttgacggtcgtgcggagttcaattgcgtccacgggatgcggagttttcgtcacggggatattcagccgagttttataatgggtagttatgtagcaaagattagatcatcaagtcggggggcatgagggttgggaagtgtcgatgttggaataggctcaagatgctggagcgcaaagggtcgagctgtggtatgacgccaagttttcaaacatattgggttatgtaactatctggcccagccctggagccctggaggccatgtatttacaatgctacaacgacatcagggttcctgctttacatgtttctgtttgtaaatctcttatgtcggattggtctaaaataaaataacccaagcataagccattcctatactagtagcccctcattgttgaccgctatctacatctgcttgtcgtgcctgctacccaacgttgtctcctttcattcagtccaaggaacacactgtttcatatttgtctgaaagatttccattcgttttgatctcatctcctcttatatcaccctttcgacactcctaaatcaagctttatttcactaactagggctagttagcactcggggttgatgacataagggactccgatcaccggtcccgccttaagaaaaaagagtcaaagttcagaatttcccggctctcaaattctttctgatcagcattgggattgattgtcttcatcgtttggcagaaacgtttggcagaaatcagcctgaacttatcatgtccgacgaggctcccaacggcgccacgacgcccgtcactcccaagacgagcgggcttgcgctgactgagtataccgccgctccgacgccgccctctgaacgtgagcaaaggaccccaggattgcctcctaattggggaattcccgaagcttttctgcttcccaacggctacccagatgtaattcaagttctgcaataccccactgaatcttcaaattctaacactgccccgccattctagtatctccggttgattttgacgtcacgagtttacgatgttattgaagaaagccctcttacccatgctgtcaacctgagtagccggttggaaagccgggtgcttctcaagcgcgaggatctgcttccggtgttcagcttcaagctccgtggcgcatacaacaagatggctcatttgagtgatgagcagcgctggaagggcgttgttgcttgctctgctggtgagtttataactggtagataatgcaaaatggaaacgccttctgactcactcgacataggaaatcatgctcaaggtgtggccttttctgcccgcaagctgagaatccccgctaccatcgtcatgccctccggcacccctgccattaaacacctgaatgttgctcgcttgggaggaagtgtggttcttcacggaatggacttcgatgctgccaaagatgaggctcaccgattagagaagctgcatggtctaacgaacattccaccgttcgacgacccttatgtcattgctggccaaggtaccatcggcatggagcttctgcgccaagcaaacttggacaagctcgaggcagtcttctgtgctgttggaggaggtggtcttattgccggcatcggagtttacctcaagcgcatcgcaccccaggtgaaggtcatcggtgtcgaggcttacgatgccaacgctatggcccagtccctcgatgcgggtaaacgagtcttcctcaaggaggttgggctctttgcagatggtgcagcagtgaagtctgttggcgaggaaacttggcgtctcagccgggaggtcatcgacgaagtcatccaggtgtccaccgacgagacctgcgcggctatcaaggacgccttcgaggacacccggtccatcgttgagcctgccggtgctctcgctcttgccggtctcaagaagtatattgccaagaaccctagccctgaccccaaccgcgagcttattgccattacctccggtgctaatatggacttcgaccgtctgcggtttgttgctgagcgcgcagctctcggtgagaagaaggaggctcttcttagcgtgaagatccccgagaagcccggcgcgttcgccaagctcgttgaaactgtcctgccccacgccgttaccgcgttcaactaccggtacgcccgcgcagattcggctgatgtgctgatgggtatctcgctatctgcctctactggccgcgaagacttggccaagatcatgggagagctggaaaaggccggcatgagctgccgggatttgagtgatgacgaacttgccaagcgccatgtgcgcttcctcgttggcggccgctgcgaggctgccgatgagcgcatcttcatgttcgagtttcccgagcgtccaggtgctctcgccaagttcctcaccacccttcgtccggaacagaatatctctctgttccactatcgaaactacggcggtgatgtcggcaaggttctagctggaatccagtgcccgtcgcccgagaaggaggacttggaggccttccttcgggatttgggctatccgttcagtgagcacactgactcgcccacttacaagaccttcttgcgttccgaataaacattttgttctaaaattgcaaaagaagggaaggtgggtaacgagaaatgtattgttcatagcttgttatggtttcagcggtttaaggtccaggcctgttttgtctcttgtttggcgtttggttgattttgatagaccctttgtattataggtcacatagtctacttttagggttctcactacatactagcataagtacaaataccctcaaatcttctttttcttattatcgagcattaaaacagacttttctatcgagacactcaataaatccacatttcgcattgtcattctgttttacttgtagtataaaacggaccaatcacagcggccactcgcatcggctgaccggcgatacagaagctccggccaacatttgcgatcgcagcacaactaaagaaccttggaagccaaacatcaacctcgcaccgcaccccgatacctcttttgttcttcataaggaacatttgaggcgcagcctccacttgatcgtcttttgggaagataaaacagaatcaaaacccgccgccatgttttccctccgcgccgttttcggtgcctcctccggggccctccgccagttcttcccctctgtgaccacccggaccgcctcattacggcctttctcacacatgattcgcaacagcctgacaagactccgtggacaagcaaagtccggcaatgctgttgctgtggcgaatgggtctgctaaacaggtggagcaggttcgaggaatgaagactcggtcttctgttaagagactatgcgatggctgcaaggtatgatctaggatattgaacagcttcaatgctggaatgattgcgaagtcatgttgtctggtgctgactttgaatagcccgttcaccgcaaaggccgtgtctacattatctggtgagtggaccctgtgacattgaagcccggagttgttcggttttaatatgtttttttcttggtcttttagctcgaagaaccctaagcacaagcaacggcaggggaaatagagtcgtcactttccatcattttctccgatagcttgcatcgctttatccttccgcggcagcctttactcgaacagtctgagatattggcgatacttctaggcataaaaacatgctctcaataaccaggttgtcttcagctgccttggatacacgacttgccgtggcggaactcgtacggcggcatatttttgcattcttgttacaaaaccagacagtggtaccacggcgcttgtgtattttccttgtatattagtgtgacaatcaagtttatttggtcttcatgtttcgatccaattcatcctaatctccagtctttctcagatgcccaatatctatggatatatgcgcaccttactccaaccaacggcttgtcgccctactcaaacctccacgaccaagatatggccgttttcaatatcgatatctcattttatggctagctatacaccgaattgtaatctaccggctctgatgggccgatgtaaatagtcacgtgatgcgttcctggcttccccgaacttttttttcggagccaactaaacatccaattcgcgttgatcatctcaattttggagtggttggatcatcaccatgcggtctccttatcttgcacggttacaaacccgtgcggtgtttggtctaaccagatcagctcgtttccaaccccagactcttctgcgccagcgatgcgcttcaacgcccgcgttccggtccgccgctgttgcgccggcttatcagtcgaagctgggacaatgggaccagcgccgaaattcctctgctgttgcttctgcggtgtaagtatgcttgtcgacccgatctgtttcttttgctctttttaatgttgttattagtctcgaggctgctaaggccgacccggagggtctgtcccaagccgccattatcgacaatctcgatccgctggagtccgctcgtcttagcaagtgtcgtaacattggtattgcggtatatactatcccacttgctccatgtacgctttttgttcttgtctaatgaagtctcgctgcctaggcccatatcgacagcggtaaaaccacctgcacagagcgagttcttttctacactggtcgtatcaaggctatccacgaggtccgcgggcgtgacagcgtcggtgccaagatggactccatggacttggaacgtgagaagggtattaccatccagtccgcggccaccttctgtgactgggttaagaaggataaggagggtgttgaccagaagtatcacctcaacttgattgatactcccggtcacattgatttcaccatcgaggtcgagagagcgctgcgcgttctggacggcgctgtcatgattctgtgtgctgtctcgggtgtccaatcccaaacgattaccgtcgatcgccaaatgcgtcgttacaacgttcctcgtatctcatttgtgaacaagatggaccgtatgggtgctaatcccttcaaggccgttgaccagatcaacactaagctgaagatccctgctgctgctgttcaggtccccatcggtgccgaggacgagttcgagggtgtcgttgatttgatccgcatgaaggctctatacaatgttggcgagagcggagaggagatactggagaaggatgaaattcctgagaaggtcaaagcccttgccgaggagcgccgtaccatgctcatcgagactcttgccgatgtcgacgatgagattgcagagatgttcttggaagaaatcacacccagcgaggatcagatccgagctgctatccgccgagctactattggcttgaagttcacccctgtcttcatgggatctgcgctggccaacaagtcagttcagcccatgctcgacggtgttattgatttcctccccaaccctgctgaggtggagaatctcgctcttgaccagaagcgtgacgaggcgtctgtgaagcttgtcccttataactctcttccctttgttggtctagccttcaaattggaagagagcaacttcggtcaattgacctacatccgcgtctaccagggtactctccgcaagggctccaatgtcttcaacgctcgcaacaacaagaaggtcaaggttcctcgtattgtccgcatgcactccaacgacatggaggaagtcagcgagattggcgctggtgagatctgtgccgtcttcggtattgagtgtgcatctggcgacaccttcactgatggaactctcggctacagcatgacatccatgttcgttcccgagcccgtcatctcgctctcaatcaagcccaagcagagcaaggacggtgccaacttctccaaagccatggcccgcttccagagagaggacccaaccttccgagtttcctatgataacgagagcgaccagaccattatttccggaatgggtgaactccaccttgacatctacgttgagcgtatgcgccgtgagtaccgggtcgattgcgaaactggccagccccaggtcgcctaccgtgagaccatcggcaaccgtgttgagttcgatcacctgctcaagaagcagtccggtggacctggtgaattcgcccgtgttatgggatggatggagcctaccggcgtcctcgaggacaacaagttcgagcagcaggttattggaggcagcatttcggagaagttcctgtacgcttgcgagaagggtttcaacctctcttgtgagaagggtcctctgattggccacaaggttctcggaactcgcatggtcatcaatgacggtgccactcacatgacagattcctccgaaatgtctttcaagaatgccacccagcaggcattccgcaaagctttcgcagaaagccagccttctgtcttggagcctctcatgaagacggtcgtaaccgctccgactgagttccaaggtgatgtcatcggcctgttgaacaagcgcggtgccactatcaacgacaccgaaaccggtgttgacgagttcactgtctacgctgactgcagtctgaacggcatgttcggcttcagtagtaacctgcgcgccgctactcagggcaagggtgaatacaccatggagttcagccactacgagaaggctcctcctcacatgcagtatgtttcaaccccaatcacttctctaaatatattatccgttgctaactgtcttctcttacaggaaggaactcattgctaagtacctgaaggcccaggccgacagacacaagaagtaaacgataaaatatgtaataactcctcacccactccaactactctggcaagccaagctatgcaatgcctagcattggctcttgttggagccaagaagcagcatattttgctttcaatccctgctgcttcttccatccaaaaccccctgtactatttacgcatggcactatatcacattgtgactttctgggacctgtatttcaagatcatgatactactttctactctcctatccgaacaaatagaatttgtgttattttatctctccctcttcggattatttacttataactaggtacttgtgtctttgaacaaggacacccaacgaagtatggaactcttgtccttggttgtttgttgccgaactcaaaagcccctggcctgaggacctcgtactgcttatcatcaatagtagctggggtaatttgcttcagatgctgagccgactcaaagaggtgatggatcttaggcccataagaaaagacccatcacgtgacacatagggatctttccctctcgacacaatccaatcccatcttctgaatcgtgtatcccactctcgtacgcgtcttacggttctattctcaagcttcccaagcacaatcagaatacaggtcctgaattgccgaatcggatcaggccgaccgtggggtctggttttaccgtgctctcggcaattgtgggtcctagactcataccccacggcatgtcagcgaaacgccccagactcgcgtccccggtacggtataatcgcctgccgatcccagaaaccgacatcgatacctcctttccccgttatcagacactatctcccaggcttgtactaagtaagatgaatctcgctttcctatcatgctgtatttagacttgagttgctaacgcgcaacaggaacggattcgcaagtatggggactccccgagtcagcagaaatacgcgctattcacactcttgagactacgccagagaatgaacagctggttcggactcatcatccggcattgcgactacgtgatctagtttacgtatcgcatccccagtacggccctgaggtctggcttgtgaacggcgcgtgcgaagacattgaagcgggggggcgaccgttgcacccttatcctgaggatagacggaacctttacccgtctggaattttgactccacgttcaccatggaaggaggattacctttttaaggaaggtatcaacccaagaaagtttctgtcccctgagaagattgatggcttgcgcgagcttttccccacggcagtaggggcccgtgttttcgtcagtggattcctggtagtccttttcaaatcactccacgacattcaagccatatatgaggaaaactggattatggaagctggtggtttgcgaatactctatgatgaatataggcttgaagctaccgccgataccgttacatccggcatggaagtttgcgacaaacctgagagtctccagggtcaaggctgcttaggcctgagaattcggatgaacgatggaaaagaagctatcacaactgtaacgcatggctttgtgaggaaccctcgacgctcccgtatgacgaagatgttttccgagtggatcctaagagccaagagggctcttctatgcctccggaatccaccacctcaatctgatacttctgctattggagtcgtacggaactccaataaaaattctccgattgggaaagaggtttggttagcaacggagaaaaagagggtaagtctcctccctttttcccgtgcttactgctaataactccaacttattcatatagatcggtaccatctcctacacattcgacgatccaagcccagttcttccgtttccctctggctatcggcacgaccttagcctcattatggacgatgagttacctcagcttatcagcccgcctggttatcccgctgtgtcggaatgggcgtcatactctactgtactcgttgggtccgatgtctacgttgtccgaatgaatacagtcgttgggaggtgggctcttctcgaaggaaccgttggcccgaatgcaattagaaacgcaacggttataggtacccagtacctatgggaccgcactgcgcattcacagactgcatcgcttctatggaaaacgaaggaaccgtttagccctgccgatggatggtcgggatccgttctctgtcttggacggccgacggatgagttgagccaagccgttgtatttcagaatttcgaagtgctctgtaccacgttcgtcgaactcgaacccggtagaactcaagacgtacttgttaaagggggattcttactccctgaatcgatacggtcttctcaaattgtcatcggcaatgacgagcaccggggcaggaattccgatatatatccgcgccgcaggacagaacgcgcagttctagaccgtcgggtattttcggctctctagcaagatttgttctggctttggttcacttgacaattctccggaaattcttactctttactatgttatttttagactgcctcagtgatcacacatttcttacctttgtgaggctttgctctggctttggttcgcttgacgattcccaagaaattcttactctttactgtcatttttagacagtctcagtgataatacatttattacccattgtgaggccttcaaataaactagaatcctagaggagacgttagacggtcaacatacagaatgaaaaaggaagttataggatgttgttggattaggagataaggaagtctattgcagtctgtatgatctccatgcttgctagctgacctccctagatggttggggttattatatcgctctcgtcttctacagcacgaaggaaagtcccacaaacgaattcacccatgaatgatatagaaacttgaatttcttagggtcgggaaattggacattatgattttcgtatgttaggtaccatttctattagtataccatacaaaaggcacctgatttgcgatttattgttgactggggctcactaacacacggtatgtgttttgggcgcctggcacgattattctcttccgctaacgactctatagtatgccttgctacgctcagcaaaatagactcggaactcgtcgactcaaacgtctctagttattcaagcaccacgctctcgggccttgcgcaagtcttcgactccggctttcttctttagttgaggaggggacgggggaatattatagtgccaaggacttcgaataaaaacatgaacagtgtctgagggacgaggagggtgctggttgtcgtcgacgttaacggggggcttcgggcgagctctgctggacgaaagtagacccgtcgtatcctttgtctgttcaatgttagcatgttggcttggtacatagtctgcccatctcactttaatcttcttttctgccttgaaagtcgacacacgtacaaatgagggatttgggcttgaggggcatgaaaggggcgggagggggnnnnnnnnnnnnnnnnnnnnnnnnnnnnnnnnnnnnnnnnnnnnnnnnnnnnnnnnnnnnnnnnnnnnnnnnnnnnnnnnnnnnnnnnnnnnnnnnnnnnnnnnnnnnnnnnnnnnnnnnnnnnnnnnnnnnnnnnnnnnnnnnnnnnnnnnnnnnnnnnnnnnnnnnnnnnnnnnnnnnnnnnnnnnnnnnnnnnnnnnnnnnnnnnnnnnngggagggggagggggaggggggatttatgagcggaaagagccttgtccgtgggtaggattgagagaggcttcttcatggaaacgggaggtaagggcttatcctgtgatgtgtcagtctgcttcgatatatgttcaatctgatcggacccaggctcagataggggaatgtcctcggagtaatcattcttgtggaaattgaagctccgaaacgcctggatgatgggaatatcttccttactcacaccggtgaacaagggaggcaaatattcctctgcatgctggtcgtcgtctcctaacttgtccatgaggtcttcaacctcggggtcgctaagcgcacctatgaagaagggccatctcggatcagcaggcggtgatgtagggatacgaggaagtcccttcgtggcagcaggtcttcctgcagcaccatttccctgaccaactgatggtttcgggtgagcgtcttcggcatagatggtcacattatcccagagcggatcgccttcttcatctcggatttgatagaatgccaacaaacgacgagcaatgtgcagctgggtttccccatctctcaccatcatggtcagtcgataatccagatgaaagtcttgttcgtacaagacagtcacgaggaatgcaccgatcgcgtcacctgggaccttgtccagaatccaggtcctcaagcattttctcaagtaatggattgccttaaggtcccaggaaatgagaaggcgtcgttcttgaacagcaaggacagtatcggccggtctgtcctccaagaatgtctggaagagggcttctagttgccaccggctgctgctagcttccttgtaggagcggcttagactggggttggctggactagatgattcagtggggatcttgttacctgttggagacatttgtggtgtataggatgagtgatatattgtgaggtttgtttctgctgaaaataaatgtcatacagtcaaaatatatgagaaaagtatgaacccaacggacatctccaagtatttatgccttttgggtcctttttatttagtgaaggttcccattgttaagcacagacaagagaaagagaaaacaaagaggtatgcttgtacatcttcaagtgttttgatcaaagaagatattgttctggagtatccagcaagagtaacaaagtcgaacaaagacaagcaaagagctttggtctagaaagttactcattgtcaaccctggttgcttgcagagggattctcatattacgcccatgtcaccttctgggggctgaaagacagccagtggacaaggctcaccatcaaaagaggcgaatgagtattgttcaaattcagatgtattggaacagagatagcacaactgaattatgtacagaaggtgaagacaaaatatcatgggaatcatttgaaacagacgcaacgctccattaaatcatatatgatggattagaaaagaagacagcagccataaacgagctcactggaagggtatatgcacgccaataggggcgatagagttaaaaacagtaatgtaaaaagaaaagtccccaaacgggtagtgggcacggaatcagaacgaagaaggaatatgcagcctgcgatcaaagccacaagacccatcgaataccagtaaagacgccccggaagacaccacgtacaaacttgaaacccatgacaatcagccacacccaccaaagcacagcaacaagagcccattccaaaaccatgaatccagtgcggcggatccaccgcaaccgacggcgacgcttacgaaggcctttatcaagggcatcactcagttgcttgacagcgagtgtgctggtggtgttgagctgaacacataggtcttcggcatcatttgccgtggttcggacgcgaggagtcagggaattgttgactaggtcttccaggttcttcagctggtaccgcaggggatacgaggtggaggtggagaaatgatgcatggactgttggaacgagtgctgggtgtgctcgaaacgctggaggagacattgagcagcgaggtcgaactcgccaattcgcgtcactcgtggaacagatgtgccgggacccaccgagctttgaagccagtgaggaactggctcacggaaggtatgggctcggcgagtgatctcccgggctttgatccccgatgacaatagaagagcccgcgtgcgctcgacttctggtttaccaggtacaccggtgtcaatcaaggtacggatactgcgcccagatatactccaggcgcgactagcacctgaaagtccggggcgtcttccttccggagaaagccctggtgatgctcgagcgttggcaagcccagtgacaggtggccgtgctaagctgaaaggaatggaagagtctttgatctcgtggcgctttgtccgtcccgtgtgtagagaagggctgaaatcaagcgttttgctacgtggcagcgcgaacttcttgggagaatcacgggaaccataattttgtggagaaggaactcgctcgttaggactgccaaaatcggtcgtatctgctgtttcactccgttcatcttgccgcagcggtgatgtgaaggtcggtagggagggtataaagcttcgggatgaattcttctcagaatttccacgggtcaatcgcccaggctcatctgtaaatgttggcaggcgccgtaagagacctttggagccatacttcctgtcactcctagactcttcatcagaaccgctatcatctgatggaaatgtggtggcggatgatgatttccgagattcaggatcttctttcttcaagatgagatctccgaccttggagacttcattgcccacgatctttgttatccgacctggtcccttaaatattcctcgcagctttgattcggggagatggggccctttacgggaccgatggccatctccccgattgccttcctgcgtgccttgatcgtcatgataggatgatgacacaacgtcaggaagaggactcggctcgagcttagaggcaccctccgtcagtgccgtcagatttcgctgacgcaaagtctcgggttccggcaattcatcttcccgctctcgctctcgatctgcttgtttgctcttgctacgctcgtggcgtgaagcaatcttgtggcggagacccttctttgcgggcgagggagatcgacttgaggggggtgacagattgactgctatgctcgggaagtagccaatgcgagcgggagagttgggcgcagtactatccatgccctctagggacacacgaagatcgtgccggtcatcaagactacccgccgatgagaaagagtctttcatgcgcttgcgggcttgcttcttgttgaccgacaatggctcagttggctgtggtgtccttccccgatcaatgtcagcgttacgaacatcggggaatttggcgcgcgatgtccgagatgctgattgtgcgttttcgacgaatctttgaacgtgatcgcggatatgttcacgagacatgcgaggcttctcatcgacggaagggcgggtatctgagcttgaagagctcgagacgctgcccgaacgcattttgccatggtcccatcgtgacggctttcgtttgctcgaagcactacggctgcgtaagctgtgcgaatgacttcgaaatctgtgcctgtgccgcccacgacccacgctcttgaactcttgcgccaatgcagggtgagaactggagagagaagtgcgcggtgacgaatgtccctctccaggatctcgcacttcgaccgaaaggcgcttctgcttagaaggcgtcccgatgtcatcgcctgtgtccatgataactaattctttggggttagggtatagtctacagccatccttgtcgaccaccttcgtcttgttggcaccatattccagccatgcggcatcggccagaagctctgccggtgagatcttccaatcaattcgtggtcgacgggccttcgtgctgctggttcggctgactcgccgcaagctcgaccccggagaggtaggcatcatatccataccttcatgttccccgatagacacatggcggcgatcttgttggaaaggtggcagctttaagcaatctattgggtcatactctctatgactgtatttttgctcgacgttattgatccattgatggactctttcgacgtcgtgccatccttcggcatctgcgtcgatggagcatttctcgcgatacctaacttttcggttgcgaatcatttgaagcgggttataaccacggttggatctatgtggtttagactcagcatcagccgtgactgcatctcgaagaggtggtaatgagggcagtagccgcatatattcatgaaatagatcaaaatgattccgtgctctctcagcacgagccaaagtgctttcggagaattcatatgctctctgatcctcaatcgcggatggaggcaacaaattcacaacagatgattggtctaagctcggcagtgtcccatgtgacagacgcctaccagagacctgggtaaaattgcgatacggcgattcacgctgaaactccctcgctcgtggagaatacgcatagccgttcactgttggaacagtgggttgggagacagatattggtcttcggctctcagggccaaggggtattccagaggctgtcctcctccgagattcattaagattcaaggctagattcacaatctggatcgagtccctatcaaggccaggagttgaatgtgtcacattgtcttcccgtagctcaggctgcgaggggtttccggagggctgtctatcaggagtcgtagaaggttgccaagcactattcgggtttgaacttgagtcatctgggattgatatagatgcatgatgcttatgccggatccatggaaatttcgagcgtttcttgggtaccacaatatccggttctggaacgctgcgcttctcttgagggggttccgaggggcgagggcgatgcaggctaactcttgtgcttcgcggacgaggtaacgagtcaagcaggaaaccccctgagctctgcgttctccgctggctcggtgtcctccgatttccatcacgggaactgctgcccagtgtactaccctccaactccacgctcgcttggccgtcgttctttccggacgaagtctggcgaaatgaacctccatcggatcggagaaaaggcgacgctgtttccgaggatcggtctcgtggtcgtccattcaccggagacattgaagatcgtacagggggctcgttcggttgttgcgacattgctgcaggaagggcaacaatgctagatggcaacgttcgaggaagagacagacattattcggtcagacacaagcatatgtgcaaccagccaaattggcaagggttcaaataccagtgaaattgaagtcaatgttgcacaatcagttgcactatcaggctgcaagttgtagatcggaatgcgcgtcaggccatgttacgtaatcactttattcgcacccgtgggcccgcctaggcacgaaaccgcggaagactcgagtatcagtctgatactatcagacttgttcgtttgatttatgatgagaagatttgtccagatttagagtacatactacaaactgcacaccttatataagtcaagagacataggaaagttctagcatctgggtctaaagcacaagtacaactagaggtacagttcctgtaaaacgaggatatacagggtaaaatgaattcagcttcgctcaaagtatgcgcttactcaacccgcaagcactggaggcgggcctcggcctcgataacctgggagaagaaaagtagttagtggatctgttgcaaattgccaaatcgaaaggtggaacaaaagcttacttcgagagcctgtctaacttcaagaaccttgcgaacatcacccagccagtccttgctgagaattttagcccagccctggagggtgttcatttcccgagcggcggcgtcaacatcgccctgctgcaacaggttctcagtgcgcaccagaacgctctcgacgtcatcaccctcggacaaagcatccttcttgaacatgaccttgcttaggacaaggctggcagcgtgactggcaacaccggcatcctcgggaagcaggctagccttgcggacttcacttgcaacgcggcggaaacgctcgaatatctgagtggtggaggggataccacgctggtaagcagtagggttaatagatgcaatggcagcctcgacgacggcatcaccagcagcaagctctttcacggccacaagctcacgaacgaacggccggggggtctcagcacgctcgaccacggtccgaacggcgtccagtgcgacctgcagctgctgagtcttgagattggtgtcgatcacgtcgctccatccagcggtcagcttctcgagctcgttaatgtcggctgtgagctcagtcaatttgctcagacggccctcacgctcgcgttcgaccaggctctggacctcgtggacatacttgcggttcagctcgatagcttgctcaacgagctcattttgaagacgctgctcagcaagctcctgagcgtggcggagctcagttttaaccttatgctggtatgcctgggcgagcttctcgcgctcggcctcgaactcttcacggaatgaagcgagatcagtggagcgcacttcctcaaattggcgcattaattcacgtgccgagtcatcaaaggtagcatgaagcttgttaagctcctcctgggcggtgttgcgagcctcgctgcggataccagcgatcttctcggcaatcttctccagctcgcccttcgccttggcgacaggagcagagtacttgccggagttttcatcggcgctgatgacagtaacgatgtcgttgaaggtcttaaccagatgctggacaacagcgtcatcaccatcctgcaacttgaccagttcaatagtgctcgcagaaacagcaggttgtctgggctgatccagcgagacggggttcttcgcctccgaatcaggcttcgtgtccttggagctaggcttcgaggcgtcttccttggccttcttgactacggcggtccgatcctcgggcttggcagtcgacttggtttggccgtcgtgagtttccgctgccttcttagaatcgacttcggccttcacttcttcagcaatcttccaagacagaccgctcttgccggggattgtgatgggcttttcctcttctcggggtacggccgggagacggttttggtgtctcaaggcattggggaagcggcggtagaagtcgcgctcctcaaagtagaggacgcattcttcaccgtagggaatgtactcggtaaagaaatcgtggaagttgtcggatttcagggccaggaagatgctgccaccataggcaaagccggatgtgaggatcagataaatcaagaaccgacggaaacgaccggatttgcggggagcagctgccggaggcgagggaggaagcttagattctacagaaatatcgcattaggacataaggggtgggcctcaatggtaattgatgaatgaacgggtcgtcataccttgttcagcggcctgcgagatggtcttgggggggatactggattcagaggaaggggaaaccggtgtcggaccaccggtggaagggggcttagaatcggcgaagaatcgctgcgcatgatgactgtcagtatgaagagataggacggctggggagttctctttacctggcctacaagccggttgcttgcaccggctctagacagccattgcgacgggatccgttggcggacagggtttgacagcaattgtcgacccggagcaatcgaggagcgcagcatgacgagccgcacaatcgccaaaattagtggctaaaggtgatcagaaagatggatgggtaggaaaacgggaacttggttgctcagttgcgatccgccccgataatcctgcgggcggtcagggtggctttgcgcgccatttcatgcccacttccgtacatactgacatcacaaaaaatttagctggcttcggagtgcaataaaagataaaacagagattggcctattaatatgggaacctcttttccccggatattggccactggttagatgttcgggaggtcaggtgtaaacaaagaagaaatatattgacacgaacaacacaagtaacaaaaatgaatatcagttgactatacggagtcgacagaactcataaagctatctagtctgcctacactactagtatattgtgtatcttcacagcacatacaggtgaggaaaatgtattatttgagcataacatactaagaattctgaaagaggcaagggtaacgggaatagcaggaattcagcccaagacataggacgaaagaaagaagagcagatgcagacgccaggtgacaaggaacaaggagtacagaaggagcagcacggtcaaagcaccgacagatccagctgcagcatgtctaaagccaaattccatgtggcttcatggaagttaaatccttctgccaaccggggtcatgtgagcccccaattgaagaggctgagcaaggacaaaagaagcaaagaaaaatccgagagagttagattgatcatgaaccgagagtctatccctcggctccgtagcggtagggaatggtgccagagtccgatggaatgacattggcgaaatcatagaaagtcacagagttataccaccgttgaaagatgctgggatgtgtagccttaggccttctcaaacggtgggtgaggcgagggcgcactacccagggggaaatatgatcgagtaactgtttaacaattgcacgcaccagcaccctgagttccgggggcctctggtcgcaagtcaacgccgggccgaggggtcgctcgcaagttccgaggaccggcctgatccagaggtagtttcttggcgatggcggtgaatagttccttgacatttatcgaggacttagcagaggtctcgaagaaaagcaggcccgcttcacgtgcgtaggcctcggcatcagcctcttgaattgctcgcttatcagggctttctgtgacaagatcgagcttgttgcctgctagggcgatcacaatgttctcattcgcttggcgctgaagttccttcacccatgatttggctttgtctagcgacgactatagggtagtttcacgaatgttagcttctatattgcaataaagtcaaaggcgtgatgcaggattgaaccatacagcttgggtgatgtcatagacaaccacagcacagttggcattgcgatagtacatcggagccaacgacttataccgctcctggccagcggtatcccagatttcgaacttgactgtggtgctatcatcgagggagatggtctgtgtcagaaaggcggctccgatcgtcgactcgcgataatcatcgaattggtcctgaaccgaaagattagcattttattactccatgtgcgttcggctcgccgcgggaagtaatgtaatgtggggatcgttgacgactcactttaacgaatctgaggacgagcgaactctggaagatagcggtcaagtcagcggctgataaagaagatcgcaagtgttatcccaaacctttccgacggcggactctcctataaagcatgtcagccatggatcgaaagatgaaaaagaagtacaacatcatcagaacataccaagaaggacgagcttgaactgggcaaatcttgcgcccgggcgggctcctgctgcttgtcgggaagccatgatcaggagagaggagggagcgtctggagggagcgtcgaaggaggaaggaagatgaactgtcgaggaactgagatatatgattcaaggtctcaagacccggatagaagatcgagaaaaatgggagatccaagggtatggagtacaaagatttaaacacttcaaagacctcgtagtttaaggcagacaggaatagatgacggaaggcccagccacaggtgcagcggggcggtgtggctgcgtactgaccagagtggcccgctgttacttttgtaccttccgtcctttttgggaagtcgtagggagacttgaatttattttccctttgatgcttgttcctcttcaaattctcttgtaagacctcatttcaggaggtcactgtttccaactatgtctcctcctattctcccgtttcgggatatcaacctacacgcgtcgccctcccactatgcctttacttcgccatcatcacgccaagcaccaactctggtagtcgaccgaccaaccggtgatttacgtttgaacgatggcccccttccaggtgctaagcgcatctcaagtattgctggaattctcggaattctcaaattgaagcttggtaattgcacttacaaacagaaactcaggaggttgcgctaacgctcacagataaatacatcattgttattaccaaagcccagcccatgggacggttgcgcggccatatggtatacaaagttgctgggaccgaattcctccccatgcgagaacggccgcttcacgacaccgacgaagatgcctatcttacattggtgaaagacttgcttcgaaggggacccatgtacttctcctactcgctagatgtcaccaatagttttcagcgacagtcacaacatgccccagatgttccgatgtggaagggcgcagacgaccgcttcttctggaatcgcttcattcaatccgatctgatcgatttcagcctcggggcaaacgacacaagtggaattcgctacggcccccaaccaggggcagacccttacatcttaccggtaatgttcggtatgatgcgcattactccggcccgagtaaagtcgacatccttcaccttcgcgcttatcacccggcgatgcagacaccgagccggaacgagatacttctctcgcggaattgacgagcaggggaatgttgcaaactacaacgagactgaacagattgtgatcttgaatgactcgacgggtggactatctgggtttggtggaggtcaatcaatgaccagtggcaaagctgggcaagacctccaagtctactcttttgtacaaaccagaggcagtgttcccctgttttggactgaagttaacgacctcaaatatacaccgaagcttcaggttcgtgacgtcgagacttctatcgaagctgcgcgaaagcatttctccgaacagatccgcatatatggagaaaactacatggtcaacctcgtcaaccaaaagggcagggaagagaaggtcaagcgcgcatatgagcagctggttcgcacattagtcacttcctcatctgagagcaccgaggctgatgaacgcacccctgaaaagatgcatgttttggaaccagggttcaagcagaaagagatggatcatttgcattatgtgtactttgatttccacaacgagactaagggcctcaagtggcatcgcgccgagttgctcatgagccgtctgaacgacgggctgacccagggcggttatttccgtggagtggagagtcctggtgcccctggtgggcagttagatactcgttctacgcaaacgagtgtagtccgaacaaactgtatggattgtctggaccgcaccaatgtagtgcaaagcatgctcggccgctgggcagtgacacggcagcttatggatgcgggcgttctccgccctggagagactgccaacgatgaccaggagtttgaagacctgttccggaatatctgggcagacaacgcagatgtggtttccaagacttattccggtactggtgccctgaagaccgacttcactcggactggcaaacgtacgcgagccggcatgttacaagatttgaacaattccatcacacgatatgtacgcaacaatttcctggacggccctagacaagatgggtttgatgtatttttgggtacctatctcccatcggactcaacatttgccaacatccagctattccttgaccagcgaccacttgtcatccagtcagttccatatgttctcgctgctagtgtgttcatggtttcggtagcgcttttcacaagacgattgcctgatgccgctgtctggccgcttcgcctgtttatgaccttctggttgctggtggcggtttactgtttccgcttcgtgcatggacacggcatgctctatgtaagttcttcttatccaggttgaagtattgacccactgacaaattcttttttttaggtcaattggcccaagctaaacacgccgatcgctggcgctgagggatatcaggatgctctcatcaaagcacgctccgatcccatcatcggcaattggcttccttccagacgacaccagcgtggcattagcaatgcccgtctcgtctttttggaagagggcaagactaggattgagtaaatgtttcattcattccggcgttcttgggttatttctttttaccctttattctcatattctgtacacttcatggctgtgtcttctattaccattctgtttaccactacaggcctgccggcagtttcctttctgttcttgccccttcaattcaattcaattctaatcatctttcatctttgttcgatacgctgtttcttgcttgcaataacctgattttccagctctatgctgctaccgtgatttccgaatcggtcccattgttcccgctgctcggattctctcgaaaggttttcgaagagcttagccaatacatgaacactttcaaatacccatatacatcttcaaatttccttatctattgaatgtgagttgttgctcattcttaaacattacaatagatgggaatattgagaataatgagaatagctagaaaggaagttcatcaacgagagggcttttgatttttttgtcttttccaagttcaatcttctacgactagatttctaaaatatatcatgttgggactcaaaaacgtgttcctagatatcaaatatactttcacttattcttgcttataactcatacaaagtgctggaaacatccaatatgcggccttatactatacaaatttatctgtgaatgtagtttataaaataacaaacgaccatgtaactagtcagttagttagttatagtcacttagcttgagttcagtcctatgtatgcgatatgttaggaagcacgtgatcttcccggtcagtatgaaaagggtttcccgaggagagcggggatcaaccagtgaatcataaattgttagagctaccggggtttctttaaccacccctgctcatttgaggactttaggcacgggtttaatttgttcatgcgagggctttgcacctctattcgctcgcaattttgcacaaggcgattttcgacttgttcgcccaccatgactcgaacatatgaggtatgccactccgggctttgcgacaaggaataattatgtcaaagtatagcatatactgattttggaatacataggctgcgattgcatccctcaactcattgcagactaactatgcgattgtggcggcgttcaagaaatctacaacgaggcaacagatcaacgagcaatccctcccggagacagtggagtggttgcggcgcattggatacaaggtgcgctgatggcagggatcttgttccctcattattggagctaatgcgagatatttacgttctctagccttccgatctcaatcggctgaacgcaattcatgtcgccggcacgaaaggcaagggctcgacctccgcattcatctctaccattctctctcaatatagccgaaaagatgcggatcaacctggatccaatcttaagatcggtctctatacctccccacaccttcggttcgcacgtgagcgcataaagatcaacaatgccccattgtccgaagaacagtttgcgcgctatttcttcgaagtgtgggatcgccttgagcactctgctaaattgctgggccaggatcccaccgggcctgggacgaaaccacaatatttccgatacttgaccgtgatggcattccatacctacttgagcgagggcgtggacgccgcggtgatcgaatgtggaatcggtggtcaatatgactgtaccaacgtgatcccacagccgaaggtgacagcgattagcagtcttggaattgatcacgttgatttgcttggacatacgattgaggaaatcgcgtggcacaaggctggcattttcaagcgaggcgtaaatggattcgcggcaccacaacctctggctgcggaacaagttttggctaaacgcgccgaggaggctggtgctcaactggaaatcgtggcttgtcatccagagcttcgtcccgaaagtagcaagatcacccttgggttggctggagacttccagtataccaatgcctcagtggcagtggcagttgccgcggacttcttgcgccaggttgacattgatgttccggacaatatcaagacagaaccactaccggcaaagttcaagaccgggctcgaggaaactcgcctaggtggcaggtgtgaaacccgatttgagaagaatgtctcctggtatatcgatggcggacacactctggagagcatccggctggctggccagtggtttgcgtcgcgtatccaggccgactcatcgtccgaggacgtagccgccagaaagacacggattttgattttcaaccaacagactcgtaacagcacagctcttgctcgtgctctccacgagacccttgcgttcgcccttggaaatgatagcccattctctcatgccctattctgcacgaacattacctacaaacaggcgggcttccgacccgacttggttagtatgaacactaatgctgatgacctcgaactccttcgagtccaaaaatcacttgccgtggagtggaatgctattgaccctcatgcgcaaacacatgtttttggtacaattgaggaggctgttgattttgcgcgggaagttgcgggccaggaacgcaaggtcctgcagaaggatgaagctccggtcatgacttttgtcaccggtagcatccatttagtcggaggattccttgatgtggtcgagacaaaaccacccaccgacgcatgattcccagacgattggtagcctggagctccagagattcttgcattcattgtatcaaccacatgagatatgcttttggcttagtataggacggacatagatgtgtttctacttggatttcaacaattcctcgattttaagcatagtttcatttacaatcgtttaaatgataccatattcgaaagttgtacgtgcttgggatctacatggactttgcatatgtggatgccgaggttcctgatgtaggccattaaacgtttattcgctgagcaggggtcttcactgctcacagtggagcactagtactccctacagaggtgcaacgtatccataaataataattaacaattatttccactactataaataatagcgtgagtgaagcaagttatgtagagttcgtcttaaacttgatcacagtattattaagtcagattgcccgcacgacccccaccagagatccgcggcgtttgaaacgtggggcccaacccaattccttcttccacaacaccccagcgcatcatgtccgactccagcgataagaagggcaaggctcccaagcgcaatgacaatgagtctggcgctccatcagactcaggtaatggtagggctccttccagcctcccacactagaccctagcgcagctgttgacattcaaattctagaagcagggaagaagctccctgcgaagttcgcttccctactcctcgaacaaaacccggccttgaagagcgagctagctgcgatggacaaggaccaagctgcggccctactgcacaacatggacctctcgcagatgctgactggattggcggtgggaggtaagaaccagaaggatatggcctcgtacaagttttggcagacacaaccagtgcctgccttcgaggacgctggaaaaaaggagattgttcaaggacctatcaagatcatcgacccagagaaggtttctaagacccccgatgcgctcgttgagggatttgagtggtgtactcttgacctgacaaatgaggaagagctgaaagagctctacgagcttctcaacaagcattatgtcgaggatgataatgccatgttccgtttcaactactcggaatccttcctccattggtacgattgagtcttgaatatgttacctatctcagaatgttaatgctaaatatatagggccctgatgtctcctggatggaagaaggaatggcatgttggtgtacgcgccaccaagtcgcgcaagctggttgcatccatttgcggtgtcccgactgaactccgcgtccgcggcgagcgcctcaaggtgacggagatcaacttcctgtgtatccacaagaagctccgctccaagcgcttgacccccgttttgatcaaggagattacccgccgttgctacctcaggggcatctaccaggccatctacactggaggtataatcctacccacacccgtcagctcctgccgctactaccaccgttctctggattggttgaagctctacgatgttggcttctcgcctctgcctcatggctcgaccaaggcccgccaggtcactaagaatcatctgcctagccagacgtcgacacctggtctgcggcctatggagtccaaggacattgatgccgtctttgatttgctggagcgatacatgcggcgctttgacctgaaccaggcctttacacgggaagaaattgaccactggcttgtgtacaagaagcagccagggaaagaccaggttgtctggtcatacgttgccgaagacccagaaacccacaagatcactgattttgtctctttctacaatctcgagtctactgtgatcgacaatcccaaccatgattccgtccatgccgcatacctgtactactatgcaaccgagagcgcgttctctaacgacaagcaggctttcaaggagcgcttgcagctcttgatgaacgatgccctaatttgcgcaaagcaggtatgttgcaatgtgctatatctcattctacatgctaatctcgtcttttttattttatttgcttaggcccgtttcgacgtcttcaatgctctcacctcgcacgacaaccccctcttcctcgaggcgctcaagttcggtgctggcgatggccagctccacttctacctttataactatcgtgctgcacctatcggtggtggaattaactcgaaaaacttgcccgatgagtcgaagatgggaggtgtcggaatcgtcatgctgtaggcttgacgctttggctagtaaatctaacgtcggataccccggaaacgaattgcttttccttgtaccgtgctagcgatcaaaagaatatgaaaatcaaacgaacattttatataccaatgttttctggctagacttgtggctggccctagcgaatttcgtgttggcccagacagggaacactgaaagtacttgaggtattacacggctttccccgtttctatacttttaggaagaagctatcggaggaggcaagatctgttgagtacgaagagacttaatctaacgcgaggtctccgagaggagggaggctgagatcgggagtgttctggttactggagataggatatacccatcacatgatctggggtatcacatcaccacgtgataaaactgatggtcatgtggtcctgaggcgctgtcattacgtaattctcgctgatcatttgaagtctcaggcaggcataccatgcctcaggcaaccgactgacgtcgtcgcatggaattcggctccccatgttgacttactactgtttgtcgatgctgtggttttttcatcctgaacattttattcagcaacttttcctttccttcaaactccttgctcgatatcggctcttgagcactgcgacggaacgctgccgtagctagcagtggggtcatccccgcaacaaccatcaacgatgggtgcagcccagtcgaatgagcatggcgcatcatccccaggtaagttctatttgctatatctgtggttagttttatgagacacatgaatgttctactctctcgatcgaccgtaattgtcaataaatgcctcaattttgccatggatatttctccgtcttgtcaacaatagttgtctctgaccacatgcataaacagaagagttgagctacatgcttgctgagcgcttcgccacaaaatgctttacgccattagagctcacacatttcaaagacaacttcttctctcgggccttagagcagggaggcctgcggcactggaatgagaaagtcctttcagacttcttgggtatcccagacggtatctttacctcttcacaggaacaaccgttagatgcagggccggtgatttttcgcatggtttcttatctgggagcctttccattccaaaacacgctcgcgcccagtgtattgacctttgaggccatggttaaggtcgttgtgcttttgacagaccgctacgggaaagcgctgaagcgagggcacaaagaccgaatcaagttactctttggaagcttggctgatgtggggaggaagactcccgccgaggctaatggagaatgtacgaccgaggattccgaagcttcggctgggaattcccatgcgctggggttctctatagataaaccagccaatgatgattacgatgaagatgaggatgatgatctcgcacttgcagcactggactctctcgatgcgattgaagtattcaaacacgatcaccgtgttgacaagaccgtttatgagacccgaatttctatcgatacgttccgccgcttggttatgctactccttgtcattgcacccctgaagccattggattctttgaagatatatacatctggactggatgttcggcgtatggagtcggttaagaacgaggcagacagtattattgcggccttttcaccggaagagagtgatggggggatatcttacaagtcttttgcccggacgatatcactgtctcttccatatctattcgacccgctgactgcccttttcgagcacctgcttttcagcaaaaatctgaacctatctcaacgccgccataaaggtctagctacggagaccgaacccgaggagagcgaggagaacgaagaacctcccctacaacccgctgcacttacacttccgggaagtttcgaatcggccatattaaatccgacagttaattcgcatctttcgttcttcctcccatctatctcacccgatatcaatatcctccgaggtggcgtcaaactacatcccgtcttctctacaaacgcccacgggtcttccttaacatatttctcccaccacgtcctcacctggcaatctgccactctcctcatcctgcaaggggctctagtagattcaagcagtgaagagttgataacactaggggcctacattccccaaacgtggaaaaccgcctcatcgacctcaggctcatcttcaaaaacatctgacatcctcccctgtctctttcaactatccccaaagcacctcctcctcccgggaaacccctccccatccgcaaagaagcccaacaccccaatcgcctacttctcacccaacaccggcatcgcaatcggctgccaaatccccgctccgtcccgcacgcaccaaacctacccgaccccgcatggagcaggcagcctcataatcgacgcgaacatcgaaacggccgagttccacgccgcacccattggacacgacggcgccttcttacccgctagtaatacatcgcccgaagacccgcccacaaagatcaagcttgatctgtataccctggagatttggggcatcgttccagacccagaggcgtcatcatccgcagagacgaacttgggtcccgtggagattcagcgtgcaaagtgggaatttgaggcacgggaggctgagcgtcgtcgtaatatcaatatcaaggctggagctggggattcggcggccgagagtgcgaggtggcttttggaggcggctggtattattggagatgagtctagatattctggtgggaggggttagggtggtgggctgtgccgagcaagcacgtctgtttgaatgtcctacgtggtataacttctgcggcttggtgtccttggtgttgagattcgttatcggaatcctataataaatacctgccctaccagcctgaatttttcctactcaaatctcatcgcattttcagcagaatcttgctataccatccagtcgctgtcttctaaacatatgtagttcaggggcattgtattactttcgcaaaacgtgggtctgagagatgacaagtagtacatctctaaacgcaagatcttgaacattccatcgttgtacatttaagaaactgtcacacgtaaaaccttacacaaccttgggaagtacaagcatcattcgagtgccaccttcggtttagagtttcacataaatccgatctgtttcgaagggacccttcgatgaacctaacatcatgctttcaatggcggtaacccgcttggcgcatcatagaaatctttcagatcttcttcatcctcctcgaattcgaagccagaattctccccctccgattcgtcgccagcgagctgaacacgggaaagacgactgcgggttccggaaccgagattgcccgaagaagcaggtgttccgtccctttggaaggattctgagggcacctcgcgaggtagccgcatagctaggtacccatccggcgcacgttcggcgcgatccatgatatcattcatatatttgcgcacctcgtcggctggcttgacgactcgcgctagaggctcgaggattttggcattaggggcgtgaatgcggaacgttactggttgccagtattccttaaaatttgcctcattggcaggagtccctgggagcccgggggttaggatgcctgtttgatcggtgggttcctgcttttgtggtgttcccgttgtgggtgtgcatggctggctgggcgctgggctatcggttggtagtttgtccttgtctattttgactttcggttcactcttcttagctttcgatgcccctttgcctttgcttttggagttggcagcttctgtggcggtttcgagagggaaggttgtatttggaggaactttccggactaccaaaaacgaggcgatgactgtgttttcagctgggagccattccagaatggtatactcaggaaaaagatagcggtcacccgaaccggcatgacctgaagtactacttccgtatggagtcaagggagaagtgaattcaaacacgacagacttgtagtttatcggtggagatccaagtggagatacgtaagagattgaagccgggcgggggaatggaacaggcgtagtaaattggggtggtcgagactgaagtggaggttgtgacccataagaaggttgctggtggggggcatatggtggtccgggtcgtgctcctggctgctgagcgctggctggtggtgtcgggtttaccacgggagtctgctgctgcgtagtagaagcagtggctggggtgcttacagcaccaggaatcgctgatggggtcggaaccactgggcgcgctgcttcggacggcgcagactgggaggtgctgtgttctgtggctggttgctcttccttggcagcggtcgacccggtggcactctggggaggcttaggagcctggcttggtggatcttgcgcaggggtcggaggctgcgtctccgtcttcagaggtggctgcttcggacctttggatggggtctgcgatgtttgtggggatttctctagcgatactgacttcgtcccaccatgttgttgtttctgggtctgggtctggggttgtggagtgggggttgactgttgcgtaatgggttgtcctgctgaagattgctgccggtgttcttgctgctctcttgatttgatgattgcattgagttcgtcgatatgtgcttggaaagcccggagttgctcctgagatgcttggcttgacgcaacaacacgcatcaaggccttaagttcagggtcagcagctgcccttgtggctagcatttggatcacaggatctggactgggcttggctggctggctcttttgcccatgtggcggcttttgtcctccttgaggagagggtgcgttcgggccacgagcttgttggggcgaagggtggctgcctgtatacccagggcgacctggaggagcgggagaatattgcgcaggtcgttgttgattggatgacgtgggatacggtcggtattgttggaagttattagggtggccgtagtgaaccatcggtcgttgcgggggtgcgtattgcaatgccggcggcgcactgggatctttgacaatgtaaatcgtagcatcaaagaaatggggaccgatggtgacatcgcagggcccgatttttgccatagtgtcctttgacgggttgttcttctcgatctgctcgcgcttcgtcttcttcggctttgtgtagtatcgaacaagaatgccatcgctcagccactttttcttcgatcgttcgagtgaagcgaggagaaccgcactgttgagataagacagaataatgtcagtcatgcaacaccgatgggggccgcgatcgcaaacctttcggcgattgattggtactcattgtccgacaaggatagtgcctgtcgcgtgcggacaataggcaaaggatctccatccttaacctttgttggtaaaggagcgtcaactaattcgggggatggggcgcgaggagttggcgcctttttcttgtgagactgcggcgtggcttcggagacacgtcttttggctgcagattcgcggcggtcacgcgcggggagcttgcgcttttcagccatggagaattcaatgatataatcacgatacccacgatggaagtataacaaacattctataacggaagtttggatggagagaggatggaagggagaaatgagagagacgcgataacgcgccgcttatcgccgcctccgccaagattgtccgctcacctccgttggtggttgccaacagagattaatcaactcaaccccaaaacgcataatggttgagcttaagcctatttttaggaaggcttactggtcccttgcagcaggtggcctgctatacgtgctgtgtatcctctccttgaccttcccagaggttcaacgttcgtatgtatctagttccccccgggcctacctccagagtgagctaatatagataacacagtgttctttatgccaacaagatcaatcccagcttgtggcaggatgtcaaccaagtcgaacagtttggatttttaagtatggcatccctaggggaacaacggaagtatgtttgctaaccgatccccaaaggaacccaagtccaaccgtttcatttggttacgcccgacaatgaaaccatttacggctggcatttgatgcccttgcatctttgcctggagttcgaaaaggaattaatggagaatccctctacgggcccagcggaggactacacgaagacagttgcctacaagcttctcgccaatgaccccaatgcacgagttgtggttagctgtaagtgatagacaacctagattccgactgcaaaaaactgacaggcaagtccacggaaatgcggcgcatttgggttccgctcaacgccctgccacttacaactcgatgctaagcctatctaccccatcaaacccagtccacgtctttgcaattgactatcgcggctttggtgttagcactggaaatcccaccgaggaaggccttatcacggatggtgtgtccctcattaacttccttaccgcagggccattagaggttcccacctcccgcatcgtcatcgtgggccaaagtcttggaactgcagtaacaactgcagtggcagagcgttttgcattcggatcatctgacccagcagctatccaaccggctatcaagaacgccgatccatttgctggcgtggtcctattggcatctttcagcagcctagccaatctcatcgagtcctacagcttcaaaggcctcaccccgcctatgctctctcctatcatgggatatcctcgatctcaacagtggctgttgagccacattgtggaccactgggacacggctgggagactggcgcgtctcaccggcgttaatactacttccttgaacgctgtagatatgggctacattgataaaagccttgatctcacgatagttcatgcttttgatgatgctgaaattccctggtatgaaggacgccgcgtttgggaggctgcgacgggcagacatgtcaagggtgctcctggtgctatgacgtatctcaaatccgaggatggcaaccctagcgaggtcaagatctggaagaatgagatcagcaatgaagatggtagtgaggttgtcaaaacagtcagatgggaacggattcgatacggtggtatgttgaagcaacaccctctggctataaattcgacagactgaccataatcttttaggtcacaatcgcgttgcatcaggctcagtggctggtatcgctgttatgagggcttttgagcagtaatcggccgacatattgataatccctataaagcctcgggaaatacataaactcactgatcctagccagcgtaagggtcacggatggacagcgtaacgatctcaataaatgataaagtgcatgtctttcgttaattacacatagaatatgaggacctgtgggattgacgccgaaaatgaccgcttttgaggccagaaacggctgcctttccacccgtaactttggatgtccagccccttgaccgcccactgccctataataccactattctgcacccgcccagtagcgttagtcatcctccggtcctgatgttgacgctcgacttatacggtttttcccctcgtttctactggcaaccaaaacgacgccgaaaatggctccctttcagctgaattcaagtcccctcccttttcgcccagtctatttaagcgcctataatatacttcgccttccctcccctccggtatccttatacctctcattctcttatcctcgttacctatacctcgagacaacctcgactttatcgtttcctataatataaatttcctaccctagtctttgttctattcttctctatagtacctacgcctatatatccggcttaaaccgatgagtactaatactagaccgatcctattctttataaggaaacttaagtaagactagaatatttttgtagtattagatagctccctctaaactttaagctaaagaccttagaaggtatcgctattatcgaatattattagcgaaagtaagtacttacttagttaggaaaagtcttataactaagactaatataggaatagatattatattcaattaaatgaggattatatagactttctccttttagaggatctaataatctatataaacttttttgattagatatttaaaatattataaaagaaactgctttagttatataataaatactagcgatacctttattaatactttaagctattcgcctattactgtattagtaagaatacctattaatagatataacgagtaggttatatcctatctattcctaatagagtgtacttaccttagaaaagtttctcgaaggtatattcctagccgagcgtaaaattccccgataaataaaggacaaaaatattctagatatagatacttttaatatgatttaccggtattactaggtctattcgagattcttttatcacaggagtataattatttagtttactatagtctagctctagtccgctattataagtacacaacctagtatcttacttccttaagacagcttattacctagtaatctagttttaggtaaacgtaaatgggataacagcttctagagtgatcttctaaagtacatttccttaaaagatcttctagacttagtctactattgtaatatcgaacttttctatttaaaagacctttaaagtaaacataatatcctctgtactattatcgagttttataatcttaaaggttaactagaaggcgctaataggtaagctagaattttaggttagatttcttataaactaaccttaatactaatccttactaatagaactaaattctttatatatagcgattattaactagtatattacctaatagcacagatcattatatttactttccgcgatagagcttttactaatactaaccttatactaaagcttatttagtagctataagttctaagaggtagtttatctctttccctctaatagaagcctaaggttcttaatatacctctcctttaatatcttagatatactctatatagctatagacttaataggtctttactaataacctataattcaagctagcaggcgcttaaggagttaggttaagatactagatttaaagataatattaggtattacaatttttgctactagatagtaaataaagtcaatagtatatcacttactaaatataatataatagattcattttcgctataatagataggatctcttacaatagagctaactatctacttacagaaaattttactaaccaggagtaataaagggtacttaggtagtctagtaatataatatttaaaaagtattactaatcacaatttattatatataaccttcagtatattattcttcttcagctctcctaagaaggtctagtacactttactaagagtatacttaagaagagagatttattagtactatctaatcttaccgaaacttataaatatactatttactaaaaccctaaaattctataactaagatataagaaaagagagcttatagtagagatataatctatagctagtataattaagaatacctataatacctttctatacctcttccaaaggtataagaccattaaaaaagacctagctaaactttagaaatcattagtaatcgaaactcataagatagctagaaaggactattttaataatatccctatacttaaagttaactgatagattaagtaaatacttcttagtaaatctaatattaaggaatataatactaatagttctactaaagaaaactaggagctccctatcctagactatatatttcctaaacgagcttagcttatagagaacttttatagtcctaatgcagaagacttttataaagataaattacttacttaatatatctaggttactaaggacatagttacacttctactactttataagccaagtaagtaaggcaactatattaattagattcttaataaagaggaaaatatacctattaaatagcctaagtaactagtacctaataataatagataaatatatctaatagatatttgtattatctactttagtaaatcttatcgcttagtatctaaccctcctctacataaatttccttctaagtaaccagactcacttcatcgttatcttatcgactcttatctactttatatatataataggattagctataactaggaagtatactgtattcttcctaagtttactaaaatcaccgaatttttagcctatactaataaagaatataaatataatattaatattaaactatattatcttaccgaaaggctataggttagctatagtaatagttcttccagagaaatatctatagaatcagagaatcagtaaggcaccgaaacccccgcctcctctatcaattttaatataataaatattaatcctcaattaataagacccagccctattactatcgcgaagctattagcctacctatctaaaaccaatatttctacctccccttccctaataataaccactaacttaaattcagcagagatttctatacagcaagtaataaggggaatagtaaaggcagtaaatttagaacctagccctaagctagaatctttatcacagtatataacacgcttatcttaaaaaagtaggcacctaaaagagcagcctaaggggcagcagagggataaaggacaaccaggtaaaataaaggtatctactatcaaatatatactatatcgattaaagcgattataagctcagtgatttatataaccttagggataattcgttttatttatatatttagatatagtttaagagattaatagtagaccttatcttagaagtatttctagcttagtaatatataagttctagactatagtttacttcaaatagctataaagagtaacttatattctaatagtatttaaagattatattacagaataatagtatggtaattaggttaagttaggttatatagtaacaatagccttaggtccttttataaagctcttccttacctattcctagcgtttagggtagaaaagaataacttccatccctcctagaaggaatatatatataagaggctacctaccttcttttctcttttaatagttaaactagtcttatctttaatatataccggagttagataggtcacatttccctagttaaaggctctaatatcataaatactaagagagtataaggatatagcgttaaatcgtagaaagctctatataaaggccagctctatatatatagagcataataataacttgtatatatttagacttatataacgcagtagttacaaagctatatcacttttgataagctataggtatagggtatatctaaccagcttagtaagaggagttattagagagtcctaatcgaagcttagctatagagaatcattagaaggtttaagatatataagctaaataacctttaaagttaggttatagcccttaagagtagctagtaatagctagatataatacttataagacctcggttatattatatcaaacatctagtagtaatccctctcctaatcctcgtggccctttatattataaaatactaaaaccaattcttttaagttaaagaggagattaaaagtaagttttattaaagttaaatctctccctacttctataatctcttattacttagtatatatccgttatatcatcttataaatatatatatataaagggtgatcgcctaaaaggtattctattttatcctaatcctcactaccttctatatcatcgtagcctttacatatatcgatataattattaggggtaaggatttctattttaaaaatattatactcttatatttctagctaaacgtcagtcttttctatatataattagcttatagatccttaccaggattaagcaacattggggcaatatattcaaaggaaacaatatactaacgtaagcttaattttaaaatactttctaataggtcaaatctattattcaagaatttaatactaattttatgaaatagaacaggtaagcagacatcccttattcagcagctaataagtgaaagctatttgatttattaattatcaagacaattaacgatattaaagaggatttcggtagacagcagctctattctaattagttaatagacttaacggttctagaatctctctagaaagtgataccagaggatataaaagagctagattctacgcctttatataggtaaggctagatatatcgagtcgatgattagcttctaaggagataactaaacataatattcttaatcgcaataacgaaaccaaaatagatactatatactcacagtacgtcccaccgaagagccccggccacatagaagggaaaacgtcatataaactagctcttagtactacttctctccttatccaatcattctaggcataacccagacttagaatagtctagaggtaactaggaaatacgcacaatggttcttatctaatacctaccctgtcccagtaagggctagtgttattggcttattagctaaagggtgggcccctgcagtagccttcgattcagtggtagtctacacccctctagcagctgctttctttttagcagtctactaattaattgccaaactttaaagcagtcacagtgatacgatcatggtcagaatgatatataatcgcttagacattctatatctgagggccttcttctaaaacatatatatccctacctagccatcctttaatattaggcttaccttacttcagcgtaatactatgttactaatctttccttatactacctcccttgataagaattactctataatatataggagtaccccttctatctatatacatataacagataaaggtctgtataagagggaaatacatataaacctgcataggcttaggaaggaatatctatattattatatatctgtttcgatatcgatctataaggggttcgttatataaatataggtagatagatttccttatagtttaggacccccnnnnnnnnnnnnnnnnnnnnnnnnnnnnnnnnnnnnnnnnnnnnnnnnnnnnnnnnnnnnnnnnnnnnnnnnnnnnnnnnnnnnnnnnnnnnnnnnnnnnnnnnnnnnnnnnnnnnnnnnnnnnnnnnnnnnnnnnnnnnnnnnnnnnnnnnnnnnnnnnnnnnnnnnnnnnnnnnnnnnnnnnnnnnnnnnnnnnnnnnnnnnnnnnnnnnnnnnnnnnnnnnnnnnnnnnnnnnnnnnnnnnnnnnnnnnnnnnnnnnnnnnnnnnnnnnnnnnnnnnnnnnnnnnnnnnnnnnnnnnnnnnnnnnnnnnnnnnnnnnnnnnnnnnnnnnnnnnnnnnnnnnnnnnnnnnnnnnnnnnnnnnnnnnnnnnnnnnnnnnnnnnnnnnnnnnnnnnnnnnnnnnnnnnnnnnnnnnnnnnnnnnnnnnnnnnnnnnnnnnnnnnnnnnnnnnnnnnnnnnnnnnnnnnnnnnnnnnnnnnnnnnnnnnnnnnnnnnnnnnnnnnnnnnnnnnnnnnnnnnnnnnnnnnnnnnnnnnnnnnnnnnnnnnnnnnnnnnnnnnnnnnnnnnnnnnnnnnnnnnnnnnnnnnnnnnnnnnnnnnnnnnnnnnnnnnnnnnnnnnnnnnnnnnnnnnnnnnnnnnnnnnnnnnnnnnnnnnnnnnnnnnnnnnnnnnnnnnnnnnnnnnnnnnnnnnnnnnnnnnnnnnnnnnnnnnnnnnnnnnnnnnnnnnnnnnnnnnnnnnnnnnnnnnnnnnnnnnnnnnnnnnnnnnnnnnnnnnnnnnnnnnnnnnnnnnnnnnnnnnnnnnnnnnnnnnnnnnnnnnnnnnnnnnnnnnnnnnnnnnnnnnnnnnnnnnnnnnnnnnnnnnnnnnnnnnnnnnnnnnnnnnnnnnnnnnnnnnnnnnnnnnnnnnnnnnnnnnnnnnnnnnnnnnnnnnnnnnnnnnnnnnnnnnnnnnnnnnnnnnnnnnnnnnnnnnnnnnnnnnnnnnnnnnnnnnnnnnnnnnnnnnnnnnnnnnnnnnnnnnnnnnnnnnnnnnnnnnnnnnnnnnnnnnnnnnnnnnnnnnnnnnnnnnnnnnnnnnnnnnnnnnnnnnnnnnnnnnnnnnnnnnnnnnnnnnnnnnnnnnnnnnnnnnnnnnnnnnnnnnnnnnnnnnnnnnnnnnnnnnnnnnnnnnnnnnnnnnnnnnnnnnnnnnnnnnnnnnnnnnnnnnnnnnnnnnnnnnnnnnnnnnnnnnnnnnnnnnnnnnnnnnnnnnnnnnnnnnnnnnnnnnnnnnnnnnnnnnnnnnnnnnnnnnnnnnnnnnnnnnnnnnnnnnnnnnnnnnnnnnnnnnnnnnnnnnnnnnnnnnnnnnnnnnnnnnnnnnnnnnnnnnnnnnnnnnnnnnnnnnnnnnnnnnnnnnnnnnnnnnnnnnnnnnnnnnnnnnnnnnnnnnnnnnnnnnnnnnnnnnnnnnnnnnnnnnnnnnnnnnnnnnnnnnnnnnnnnnnnnnnnnnnnnnnnnnnnnnnnnnnnnnnnnnnnnnnnnnnnnnnnnnnnnnnnnnnnnnnnnnnnnnnnnnnnnnnnnnnnnnnnnnnnnnnnnnnnnnnnnnnnnnnnnnnnnnnnnnnnnnnnnnnnnnnnnnnnnnnnnnnnnnnnnnnnnnnnnnnnnnnnnnnnnnnnnnnnnnnnnnnnnnnnnnnnnnnnnnnnnnnnnnnnnnnnnnnnnnnnnnnnnnnnnnnnnnnnnnnnnnnnnnnnnnnnnnnnnnnnnnnnnnnnnnnnnnnnnnnnnnnnnnnnnnnnnnnnnnnnnnnnnnnnnnnnnnnnnnnnnnnnnnnnnnnnnnnnnnnnnnnnnnnnnnnnnnnnnnnnnnnnnnnnnnnnnnnnnnnnnnnnnnnnnnnnnnnnnnnnnnnnnnnnnnnnnnnnnnnnnnnnnnnnnnnnnnnnnnnnnnnnnnnnnnnnnnnnnnnnnnnnnnnnnnnnnnnnnnnnnnnnnnnnnnnnnnnnnnnnnnnnnnnnnnnnnnnnnnnnnnnnnnnnnnnnnnnnnnnnnnnnnnnnnnnnnnnnnnnnnnnnnnnnnnnnnnnnnnnnnnnnnnnnnnnnnnnnnnnnnnnnnnnnnnnnnnnnnnnnnnnnnnnnnnnnnnnnnnnnnnnnnnnnnnnnnnnnnnnnnnnnnnnnnnnnnnnnnnnnnnnnnnnnnnnnnnnnnnnnnnnnnnnnnnnnnnnnnnnnnnnnnnnnnnnnnnnnnnnnnnnnnnnnnnnnnnnnnnnnnnnnnnnnnnnnnnnnnnnnnnnnnnnnnnnnnnnnnnnnnnnnnnnnnnnnnnnnnnnnnnnnnnnnnnnnnnnnnnnnnnnnnnnnnnnnnnnnnnnnnnnnnnnnnnnnnnnnnnnnnnnnnnnnnnnnnnnnnnnnnnnnnnnnnnnnnnnnnnnnnnnnnnnnnnnnnnnnnnnnnnnnnnnnnnnnnnnnnnnnnnnnnnnnnnnnnnnnnnnnnnnnnnnnnnnnnnnnnnnnnnnnnnnnnnnnnnnnnnnnnnnnnnnnnnnnnnnnnnnnnnnnnnnnnnnnnnnnnnnnnnnnnnnnnnnnnnnnnnnnnnnnnnnnnnnnnnnnnnnnnnnnnnnnnnnnnnnnnnnnnnnnnnnnnnnnnnnnnnnnnnnnnnnnnnnnnnnnnnnnnnnnnnnnnnnnnnnnnnnnnnnnnnnnnnnnnnnnnnnnnnnnnnnnnnnnnnnnnnnnnnnnnnnnnnnnnnnnnnnnnnnnnnnnnnnnnnnnnnnnnnnnnnnnnnnnnnnnnnnnnnnnnnnnnnnnnnnnnnnnnnnnnnnnnnnnnnnnnnnnnnnnnnnnnnnnnnnnnnnnnnnnnnnnnnnnnnnnnnnnnnnnnnnnnnnnnnnnnnnnnnnnnnnnnnnnnnnnnnnnnnnnnnnnnnnnnnnnnnnnnnnnnnnnnnnnnnnnnnnnnnnnnnnnnnnnnnnnnnnnnnnnnnnnnnnnnnnnnnnnnnnnnnnnnnnnnnnnnnnnnnnnnnnnnnnnnnnnnnnnnnnnnnnnnnnnnnnnnnnnnnnnnnnnnnnnnnnnnnnnnnnnnnnnnnnnnnnnnnnnnnnnnnnnnnnnnnnnnnnnnnnnnnnnnnnnnnnnnnnnnnnnnnnnnnnnnnnnnnnnnnnnnnnnnnnnnnnnnnnnnnnnnnnnnnnnnnnnnnnnnnnnnnnnnnnnnnnnnnnnnnnnnnnnnnnnnnnnnnnnnnnnnnnnnnnnnnnnnnnnnnnnnnnnnnnnnnnnnnnnnnnnnnnnnnnnnnnnnnnnnnnnnnnnnnnnnnnnnnnnnnnnnnnnnnnnnnnnnnnnnnnnnnnnnnnnnnnnnnnnnnnnnnnnnnnnnnnnnnnnnnnnnnnnnnnnnnnnnnnnnnnnnnnnnnnnnnnnnnnnnnnnnnnnnnnnnnnnnnnnnnnnnnnnnnnnnnnnnnnnnnnnnnnnnnnnnnnnnnnnnnnnnnnnnnnnnnnnnnnnnnnnnnnnnnnnnnnnnnnnnnnnnnnnnnnnnnnnnnnnnnnnnnnnnnnnnnnnnnnnnnnnnnnnnnnnnnnnnnnnnnnnnnnnnnnnnnnnnnnnnnnnnnnnnnnnnnnnnnnnnnnnnnnnnnnnnnnnnnnnnnnnnnnnnnnnnnnnnnnnnnnnnnnnnnnnnnnnnnnnnnnnnnnnnnnnnnnnnnnnnnnnnnnnnnnnnnnnnnnnnnnnnnnnnnnnnnnnnnnnnnnnnnnnnnnnnnnnnnnnnnnnnnnnnnnnnnnnnnnnnnnnnnnnnnnnnnnnnnnnnnnnnnnnnnnnnnnnnnnnnnnnnnnnnnnnnnnnnnnnnnnnnnnnnnnnnnnnnnnnnnnnnnnnnnnnnnnnnnnnnnnnnnnnnnnnnnnnnnnnnnnnnnnnnnnnnnnnnnnnnnnnnnnnnnnnnnnnnnnnnnnnnnnnnnnnnnnnnnnnnnnnnnnnnnnnnnnnnnnnnnnnnnnnnnnnnnnnnnnnnnnnnnnnnnnnnnnnnnnnnnnnnnnnnnnnnnnnnnnnnnnnnnnnnnnnnnnnnnnnnnnnnnnnnnnnnnnnnnnnnnnnnnnnnnnnnnnnnnnnnnnnnnnnnnnnnnnnnnnnnnnnnnnnnnnnnnnnnnnnnnnnnnnnnnnnnnnnnnnnnnnnnnnnnnnnnnnnnnnnnnnnnnnnnnnnnnnnnnnnnnnnnnnnnnnnnnnnnnnnnnnnnnnnnnnnnnnnnnnnnnnnnnnnnnnnnnnnnnnnnnnnnnnnnnnnnnnnnnnnnnnnnnnnnnnnnnnnnnnnnnnnnnnnnnnnnnnnnnnnnnnnnnnnnnnnnnnnnnnnnnnnnnnnnnnnnnnnnnnnnnnnnnnnnnnnnnnnnnnnnnnnnnnnnnnnnnnnnnnnnnnnnnnnnnnnnnnnnnnnnnnnnnnnnnnnnnnnnnnnnnnnnnnnnnnnnnnnnnnnnnnnnnnnnnnnnnnnnnnnnnnnnnnnnnnnnnnnnnnnnnnnnnnnnnnnnnnnnnnnnnnnnnnnnnnnnnnnnnnnnnnnnnnnnnnnnnnnnnnnnnnnnnnnnnnnnnnnnnnnnnnnnnnnnnnnnnnnnnnnnnnnnnnnnnnnnnnnnnnnnnnnnnnnnnnnnnnnnnnnnnnnnnnnnnnnnnnnnnnnnnnnnnnnnnnnnnnnnnnnnnnnnnnnnnnnnnnnnnnnnnnnnnnnnnnnnnnnnnnnnnnnnnnnnnnnnnnnnnnnnnnnnnnnnnnnnnnnnnnnnnnnnnnnnnnnnnnnnnnnnnnnnnnnnnnnnnnnnnnnnnnnnnnnnnnnnnnnnnnnnnnnnnnnnnnnnnnnnnnnnnnnnnnnnnnnnnnnnnnnnnnnnnnnnnnnnnnnnnnnnnnnnnnnnnnnnnnnnnnnnnnnnnnnnnnnnnnnnnnnnnnnnnnnnnnnnnnnnnnnnnnnnnnnnnnnnnnnnnnnnnnnnnnnnnnnnnnnnnnnnnnnnnnnnnnnnnnnnnnnnnnnnnnnnnnnnnnnnnnnnnnnnnnnnnnnnnnnnnnnnnnnnnnnnnnnnnnnnnnnnnnnnnnnnnnnnnnnnnnnnnnnnnnnnnnnnnnnnnnnnnnnnnnnnnnnnnnnnnnnnnnnnnnnnnnnnnnnnnnnnnnnnnnnnnnnnnnnnnnnnnnnnnnnnnnnnnnnnnnnnnnnnnnnnnnnnnnnnnnnnnnnnnnnnnnnnnnnnnnnnnnnnnnnnnnnnnnnnnnnnnnnnnnnnnnnnnnnnnnnnnnnnnnnnnnnnnnnnnnnnnnnnnnnnnnnnnnnnnnnnnnnnnnnnnnnnnnnnnnnnnnnnnnnnnnnnnnnnnnnnnnnnnnnnnnnnnnnnnnnnnnnnnnnnnnnnnnnnnnnnnnnnnnnnnnnnnnnnnnnnnnnnnnnnnnnnnnnnnnnnnnnnnnnnnnnnnnnnnnnnnnnnnnnnnnnnnnnnnnnnnnnnnnnnnnnnnnnnnnnnnnnnnnnnnnnnnnnnnnnnnnnnnnnnnnnnnnnnnnnnnnnnnnnnnnnnnnnnnnnnnnnnnnnnnnnnnnnnnnnnnnnnnnnnnnnnnnnnnnnnnnnnnnnnnnnnnnnnnnnnnnnnnnnnnnnnnnnnnnnnnnnnnnnnnnnnnnnnnnnnnnnnnnnnnnnnnnnnnnnnnnnnnnnnnnnnnnnnnnnnnnnnnnnnnnnnnnnnnnnnnnnnnnnnnnnnnnnnnnnnnnnnnnnnnnnnnnnnnnnnnnnnnnnnnnnnnnnnnnnnnnnnnnnnnnnnnnnnnnnnnnnnnnnnnnnnnnnnnnnnnnnnnnnnnnnnnnnnnnnnnnnnnnnnnnnnnnnnnnnnnnnnnnnnnnnnnnnnnnnnnnnnnnnnnnnnnnnnnnnnnnnnnnnnnnnnnnnnnnnnnnnnnnnnnnnnnnnnnnnnnnnnnnnnnnnnnnnnnnnnnnnnnnnnnnnnnnnnnnnnnnnnnnnnnnnnnnnnnnnnnnnnnnnnnnnnnnnnnnnnnnnnnnnnnnnnnnnnnnnnnnnnnnnnnnnnnnnnnnnnnnnnnnnnnnnnnnnnnnnnnnnnnnnnnnnnnnnnnnnnnnnnnnnnnnnnnnnnnnnnnnnnnnnnnnnnnnnnnnnnnnnnnnnnnnnnnnnnnnnnnnnnnnnnnnnnnnnnnnnnnnnnnnnnnnnnnnnnnnnnnnnnnnnnnnnnnnnnnnnnnnnnnnnnnnnnnnnnnnnnnnnnnnnnnnnnnnnnnnnnnnnnnnnnnnnnnnnnnnnnnnnnnnnnnnnnnnnnnnnnnnnnnnnnnnnnnnnnnnnnnnnnnnnnnnnnnnccctaggggcccctccgagactagtaagaattagtcttagtatactattaatatattgtgttccctctataaagccctttatatcttacctggttgataggccgtatacccgcataacgtatacctttacagacttactttagtaaattatcgatagatttagaggccgatctttctatagatacaacttacgcctactatctcttagccacatttattcctcctagtaagccagagactttcgcttactttagaatggagcctgaagcctaccttagtctatacattaaaggcagggttatagtatagatatagactgactaaaagaagattattaatacccttacttaccctagactagctattaagggaattgcagctattgggcctaccttagatatttacggctaggtgatttccctagggaatcgatttattacagttctaatactaagatcaaatccagattcgcggtaagatcatactcttcggcttacttaatataggagcaaagatgtctttcagaaaggctgaagtcttttagccttaggacaataacttataagacaaatatttaaacctacttagccttaagagtaagactaaatctccggctccaggtacagttaaaccagtattccacgctagagtcgccgtcgatacacagattaatgttcttatcaccctataagccagtattagtatcaagattagtggcagcaagattattaccggcaagaccttgatagatacttagctaagtagctatataaacactgacctctccttctaggcttatagtaactacgatacgtctaataataccttctactactaatttagggcctatctgtactataatatttgtcagaatctaggatgaatactgtcatttttcatccctgatacagttggatcacgtgactnnnnnnnnnnnnnnnnnnnnnnnnnnnnnnnnnnnnnnnnnnnnnnnnnnnnnnnnnnnnnnnnnnnnnnnnnnnnnnnnnnnnnnnnnnnnnnnnnnnnnnnnnnnnnnnnnnnnnnnnnnnnnnnnnnnnnnnnnnnnnnnnnnnnnnnnnnnnnnnnnnnnnnnnnnnnnnnnnnnnnnnnnnnnnnnnnnnnnnnnnnnnnnnnnnnnnnnnnnnnnnnnnnnnnnnnnnnnnnnnnnnnnnnnnnnnnnnnnnnnnnnnnnnnnnnnnnnnnnnnnnnnnnnnnnnnnnnnnnnnnnnnnnnnnnnnnnnnnnnnnnnnnnnnnnnnnnnnnnnnnnnnnnnnnnnnnnnnnnnnnnnnnnnnnnnnnnnnnnnnnnnnnnnnnnnnnnnnnnnnnnnnnnnnnnnnnnnnnnnnnnnnnnnnnnnnnnnnnnnnnnnnnnnnnnnnnnnnnnnnnnnnnnnnnnnnnnnnnnnnnnnnnnnnnnnnnnnnnnnnnnnnnnnnnnnnnnnnnnnnnnnnnnnnnnnnnnnnnnnnnnnnnnnnnnnnnnnnnnnnnnnnnnnnnnnnnnnnnnnnnnnnnnnnnnnnnnnnnnnnnnnnnnnnnnnnnnnnnnnnnnnnnnnnnnnnnnnnnnnnnnnnnnnnnnnnnnnnnnnnnnnnnnnnnnnnnnnnnnnnnnnnnnnnnnnnnnnnnnnnnnnnnnnnnnnnnnnnnnnnnnnnnnnnnnnnnnnnnnnnnnnnnnnnnnnnnnnnnnnnnnnnnnnnnnnnnnnnnnnnnnnnnnnnnnnnnnnnnnnnnnnnnnnnnnnnnnnnnnnnnnnnnnnnnnnnnnnnnnnnnnnnnnnnnnnnnnnnnnnnnnnnnnnnnnnnnnnnnnnnnnnnnnnnnnnnnnnnnnnnnnnnnnnnnnnnnnnnnnnnnnnnnnnnnnnnnnnnnnnnnnnnnnnnnnnnnnnnnnnnnnnnnnnnnnnnnnnnnnnnnnnnnnnnnnnnnnnnnnnnnnnnnnnnnnnnnnnnnnnnnnnnnnnnnnnnnnnnnnnnnnnnnnnnnnnnnnnnnnnnnnnnnnnnnnnnnnnnnnnnnnnnnnnnnnnnnnnnnnnnnnnnnnnnnnnnnnnnnnnnnnnnnnnnnnnnnnnnnnnnnnnnnnnnnnnnnnnnnnnnnnnnnnnnnnnnnnnnnnnnnnnnnnnnnnnnnnnnnnnnnnnnnnnnnnnnnnnnnnnnnnnnnnnnnnnnnnnnnnnnnnnnnnnnnnnnnnnnnnnnnnnnnnnnnnnnnnnnnnnnnnnnnnnnnnnnnnnnnnnnnnnnnnnnnnnnnnnnnnnnnnnnnnnnnnnnnnnnnnnnnnnnnnnnnnnnnnnnnnnnnnnnnnnnnnnnnnnnnnnnnnnnnnnnnnnnnnnnnnnnnnnnnnnnnnnnnnnnnnnnnnnnnnnnnnnnnnnnnnnnnnnnnnnnnnnnnnnnnnnnnnnnnnnnnnnnnnnnnnnnnnnnnnnnnnnnnnnnnnnnnnnnnnnnnnnnnnnnnnnnnnnnnnnnnnnnnnnnnnnnnnnnnnnnnnnnnnnnnnnnnnnnnnnnnnnnnnnnnnnnnnnnnnnnnnnnnnnnnnnnnnnnnnnnnnnnnnnnnnnnnnnnnnnnnnnnnnnnnnnnnnnnnnnnnnnnnnnnnnnnnnnnnnnnnnnnnnnnnnnnnnnnnnnnnnnnnnnnnnnnnnnnnnnnnnnnnnnnnnnnnnnnnnnnnnnnnnnnnnnnnnnnnnnnnnnnnnnnnnnnnnnnnnnnnnnnnnnnnnnnnnnnnnnnnnnnnnnnnnnnnnnnnnnnnnnnnnnnnnnnnnnnnnnnnnnnnnnnnnnnnnnnnnnnnnnnnnnnnnnnnnnnnnnnnnnnnnnnnnnnnnnnnnnnnnnnnnnnnnnnnnnnnnnnnnnnnnnnnnnnnnnnnnnnnnnnnnnnnnnnnnnnnnnnnnnnnnnnnnnnnnnnnnnnnnnnnnnnnnnnnnnnnnnnnnnnnnnnnnnnnnnnnnnnnnnnnnnnnnnnnnnnnnnnnnnnnnnnnnnnnnnnnnnnnnnnnnnnnnnnnnnnnnnnnnnnnnnnnnnnnnnnnnnnnnnnnnnnnnnnnnnnnnnnnnnnnnnnnnnnnnnnnnnnnnnnnnnnnnnnnnnnnnnnnnnnnnnnnnnnnnnnnnnnnnnnnnnnnnnnnnnnnnnnnnnnnnnnnnnnnnnnnnnnnnnnnnnnnnnnnnnnnnnnnnnnnnnnnnnnnnnnnnnnnnnnnnnnnnnnnnnnnnnnnnnnnnnnnnnnnnnnnnnnnnnnnnnnnnnnnnnnnnnnnnnnnnnnnnnnnnnnnnnnnnnnnnnnnnnnnnnnnnnnnnnnnnnnnnnnnnnnnnnnnnnnnnnnnnnnnnnnnnnnnnnnnnnnnnnnnnnnnnnnnnnnnnnnnnnnnnnnnnnnnnnnnnnnnnnnnnnnnnnnnnnnnnnnnnnnnnnnnnnnnnnnnnnnnnnnnnnnnnnnnnnnnnnnnnnnnnnnnnnnnnnnnnnnnnnnnnnnnnnnnnnnnnnnnnnnnnnnnnnnnnnnnnnnnnnnnnnnnnnnnnnnnnnnnnnnnnnnnnnnnnnnnnnnnnnnnnnnnnnnnnnnnnnnnnnnnnnnnnnnnnnnnnnnnnnnnnnnnnnnnnnnnnnnnnnnnnnnnnnnnnnnnnnnnnnnnnnnnnnnnnnnnnnnnnnnnnnnnnnnnnnnnnnnnnnnnnnnnnnnnnnnnnnnnnnnnnnnnnnnnnnnnnnnnnnnnnnnnnnnnnnnnnnnnnnnnnnnnnnnnnnnnnnnnnnnnnnnnnnnnnnnnnnnnnnnnnnnnnnnnnnnnnnnnnnnnnnnnnnnnnnnnnnnnnnnnnnnnnnnnnnnnnnnnnnnnnnnnnnnnnnnnnnnnnnnnnnnnnnnnnnnnnnnnnnnnnnnnnnnnnnnnnnnnnnnnnnnnnnnnnnnnnnnnnnnnnnnnnnnnnnnnnnnnnnnnnnnnnnnnnnnnnnnnnnnnnnnnnnnnnnnnnnnnnnnnnnnnnnnnnnnnnnnnnnnnnnnnnnnnnnnnnnnnnnnnnnnnnnnnnnnnnnnnnnnnnnnnnnnnnnnnnnnnnnnnnnnnnnnnnnnnnnnnnnnnnnnnnnnnnnnnnnnnnnnnnnnnnnnnnnnnnnnnnnnnnnnnnnnnnnnnnnnnnnnnnnnnnnnnnnnnnnnnnnnnnnnnnnnnnnnnnnnnnnnnnnnnnnnnnnnnnnnnnnnnnnnnnnnnnnnnnnnnnnnnnnnnnnnnnnnnnnnnnnnnnnnnnnnnnnnnnnnnnnnnnnnnnnnnnnnnnnnnnnnnnnnnnnnnnnnnnnnnnnnnnnnnnnnnnnnnnnnnnnnnnnnnnnnnnnnnnnnnnnnnnnnnnnnnnnnnnnnnnnnnnnnnnnnnnnnnnnnnnnnnnnnnnnnnnnnnnnnnnnnnnnnnnnnnnnnnnnnnnnnnnnnnnnnnnnnnnnnnnnnnnnnnnnnnnnnnnnnnnnnnnnnnnnnnnnnnnnnnnnnnnnnnnnnnnnnnnnnnnnnnnnnnnnnnnnnnnnnnnnnnnnnnnnnnnnnnnnnnnnnnnnnnnnnnnnnnnnnnnnnnnnnnnnnnnnnnnnnnnnnnnnnnnnnnnnnnnnnnnnnnnnnnnnnnnnnnnnnnnnnnnnnnnnnnnnnnnnnnnnnnnnnnnnnnnnnnnnnnnnnnnnnnnnnnnnnnnnnnnnnnnnnnnnnnnnnnnnnnnnnnnnnnnnnnnnnnnnnnnnnnnnnnnnnnnnnnnnnnnnnnnnnnnnnnnnnnnnnnnnnnnnnnnnnnnnnnnnnnnnnnnnnnnnnnnnnnnnnnnnnnnnnnnnnnnnnnnnnnnnnnnnnnnnnnnnnnnnnnnnnnnnnnnnnnnnnnnnnnnnnnnnnnnnnnnnnnnnnnnnnnnnnnnnnnnnnnnnnnnnnnnnnnnnnnnnnnnnnnnnnnnnnnnnnnnnnnnnnnnnnnnnnnnnnnnnnnnnnnnnnnnnnnnnnnnnnnnnnnnnnnnnnnnnnnnnnnnnnnnnnnnnnnnnnnnnnnnnnnnnnnnnnnnnnnnnnnnnnnnnnnnnnnnnnnnnnnnnnnnnnnnnnnnnnnnnnnnnnnnnnnnnnnnnnnnnnnnnnnnnnnnnnnnnnnnnnnnnnnnnnnnnnnnnnnnnnnnnnnnnnnnnnnnnnnnnnnnnnnnnnnnnnnnnnnnnnnnnnnnnnnnnnnnnnnnnnnnnnnnnnnnnnnnnnnnnnnnnnnnnnnnnnnnnnnnnnnnnnnnnnnnnnnnnnnnnnnnnnnnnnnnnnnnnnnnnnnnnnnnnnnnnnnnnnnnnnnnnnnnnnnnnnnnnnnnnnnnnnnnnnnnnnnnnnnnnnnnnnnnnnnnnnnnnnnnnnnnnnnnnnnnnnnnnnnnnnnnnnnnnnnnnnnnnnnnnnnnnnnnnnnnnnnnnnnnnnnnnnnnnnnnnnnnnnnnnnnnnnnnnnnnnnnnnnnnnnnnnnnnnnnnnnnnnnnnnnnnnnnnnnnnnnnnnnnnnnnnnnnnnnnnnnnnnnnnnnnnnnnnnnnnnnnnnnnnnnnnnnnnnnnnnnnnnnnnnnnnnnnnnnnnnnnnnnnnnnnnnnnnnnnnnnnnnnnnnnnnnnnnnnnnnnnnnnnnnnnnnnnnnnnnnnnnnnnnnnnnnnnnnnnnnnnnnnnnnnnnnnnnnnnnnnnnnnnnnnnnnnnnnnnnnnnnnnnnnnnnnnnnnnnnnnnnnnnnnnnnnnnnnnnnnnnnnnnnnnnnnnnnnnnnnnnnnnnnnnnnnnnnnnnnnnnnnnnnnnnnnnnnnnnnnnnnnnnnnnnnnnnnnnnnnnnnnnnnnnnnnnnnnnnnnnnnnnnnnnnnnnnnnnnnnnnnnnnnnnnnnnnnnnnnnnnnnnnnnnnnnnnnnnnnnnnnnnnnnnnnnnnnnnnnnnnnnnnnnnnnnnnnnnnnnnnnnnnnnnnnnnnnnnnnnnnnnnnnnnnnnnnnnnnnnnnnnnnnnnnnnnnnnnnnnnnnnnnnnnnnnnnnnnnnnnnnnnnnnnnnnnnnnnnnnnnnnnnnnnnnnnnnnnnnnnnnnnnnnnnnnnnnnnnnnnnnnnnnnnnnnnnnnnnnnnnnnnnnnnnnnnnnnnnnnnnnnnnnnnnnnnnnnnnnnnnnnnnnnnnnnnnnnnnnnnnnnnnnnnnnnnnnnnnnnnnnnnnnnnnnnnnnnnnnnnnnnnnnnnnnnnnnnnnnnnnnnnnnnnnnnnnnnnnnnnnnnnnnnnnnnnnnnnnnnnnnnnnnnnnnnnnnnnnnnnnnnnnnnnnnnnnnnnnnnnnnnnnnnnnnnnnnnnnnnnnnnnnnnnnnnnnnnnnnnnnnnnnnnnnnnnnnnnnnnnnnnnnnnnnnnnnnnnnnnnnnnnnnnnnnnnnnnnnnnnnnnnnnnnnnnnnnnnnnnnnnnnnnnnnnnnnnnnnnnnnnnnnnnnnnnnnnnnnnnnnnnnnnnnnnnnnnnnnnnnnnnnnnnnnnnnnnnnnnnnnnnnnnnnnnnnnnnnnnnnnnnnnnnnnnnnnnnnnnnnnnnnnnnnnnnnnnnnnnnnnnnnnnnnnnnnnnnnnnnnnnnnnnnnnnnnnnnnnnnnnnnnnnnnnnnnnnnnnnnnnnnnnnnnnnnnnnnnnnnnnnnnnnnnnnnnnnnnnnnnnnnnnnnnnnnnnnnnnnnnnnnnnnnnnnnnnnnnnnnnnnnnnnnnnnnnnnnnnnnnnnnnnnnnnnnnnnnnnnnnnnnnnnnnnnnnnnnnnnnnnnnnnnnnnnnnnnnnnnnnnnnnnnnnnnnnnnnnnnnnnnnnnnnnnnnnnnnnnnnnnnnnnnnnnnnnnnnnnnnnnnnnnnnnnnnnnnnnnnnnnnnnnnnnnnnnnnnnnnnnnnnnnnnnnnnnnnnnnnnnnnnnnnnnnttgttttgtttgttttgattactaagttgtccatcagattgtcatgttttaggactattgtcagttttagagagttagagaatttattaagatttttctgccacaaaatacactcgccttaccaccgtttttccgtcaatattagatataaggctctagctaagattctcagctttattaactaggcaacaggtaatcgtaaggcatatttacctgataaaatgctcaaattatacgaaaagactggtaccattccgatattagaatctaatatagggaagcgaggcctttctatagaagccgatacttaagagtatgaaattacagtagacctatctaaaaatagcacaatatctatcttagaaacagctgccgatatatttcgccgagctaatattacaactttaggtacaaaatctgtgacaagtgtattaatcagtatcagaaactaactagttacctagaccctaaaacccccaagttcataaaacagggccattatccagccggagctagtagcttctagctaccagaattgcgatataagtttagaagttttcgtcgaatgtaacattttcttttgtagactgactaagcatgtattaacagtcaattgcggcttttttggtccgtaccaggccataaatgagatccttgataccgacggagatcttcaggaaaggctgacatatgatatgcccggcctctgtgataatatcgttaatcttacgccattacgcttaaagttcacattctcctaggacggggtaacagccagacgcaactcagtttacccgagaaagacagtcggtggccagagtgtaacaaaatgttcggcaccaactgctgagcttaacaaggcagttaggcgaaggggcttgagcctccagtgtgatgaatttccctgggggtctagtgagcagggaggagaatggctacctgcgagtcagcgtcgtacggagtgtgtcaccagcttccagaatgcatggcacggaaattgcgtccgtaagtgcttaattctttttcatctataattgggttgttctggattctgtgggaaacttgctaataaatttttagaattggttggacaactttcatcgaactggaaacaactggaccctgagtcccggaaagattccaagaagatagattattgggcatcatggcagaaacgaaccggtaagcttatattctatttcttcgcaattgggctatctaacactatgtctttttgcgttagactggacccacgcgggcaagtatgggatagggcaaaacataccatatgaacaaaaactcattgaatacggcgaagaaatgcctcctccagatggtggggaccaggtatgtattcaatttcaggatttaggaatttacctaacaaagcggtgacagggagataacaagaagctatcgtgggcttttaaacgggactatgagacttcctggcttaaccctcaaacaccactcacgtccgcagactggtggaatgccaaccaaccgacatggtacaaacccaaatacaatgggcctcttaccatggactcggttctttgcgcggtcaatcattttaatcagggcaacgtgtataaactacctggtgtgaaagtcaagtcagatggaacaccaatcggcgtgcaaaaagagtacaacgcatattgcaaaagaaccaaccagggtggtatggccccccctgcttggggcgtcgattttaccatgggaagatgtctcattcgtttccaaaacagcgcaagcagcagctcgggcacatctaaacgggacgctcagaagtggggtgaatgggaagttgaaagtatgtggacgccgaacgatgtctactcaagcgcttgctgattctccttttaggcattgaatatgtggaggatgtggacgatgccgagatggctcagttattgaagcctgcggatctggatggttctgaacatgaaaggtaacttgccttgaatgtcgatgaattttttattttttatttctttggcggagcagacagccatttgcaagacgccggaaaacggactctcctgttggagcgaattccgaagtgtctggcaactttttcaccttttagttcaccctatctagtgtatatgcaacaccacgttcttcatttcatctattgattagggtctgcaagttcttcttccgtcaattgatacagttccctccctaattctgcactggctcgatacttttccccaacagtagagccctcaaggaattcgttggtttccatccatgtaccaatcacaccaaagagatcgtgaatctcaggatccatacgaccttcgcgaatgacgtttcggaaaccatctaaataaagcacatacaaacttccagaccggaaagcctcctcgtccgcaaggataagatacgtcctcgtggcgcatttttgtaaccctatcgcgaggctatcgatgattgtgtctcggtcatcgcgccaagcctccggggcttcttcttttgcttcggcaatttgcgttttgagatcagagcggaaagtttcaaggtcttctgctttacgggcgcgcggaatcctcattctatcatcgacctcgggttcaagtgggcccgcaagttcgggaagaatctcgtacacacgccgccactccgatccgaagttgaagagatccgcattattgagaaccgcccaccaggcttctgattcaaagggatctgaatcgacccattcagacattaaatcatcgtgtctggctttctcttcttcgtcggtgcaatagtgcgtgcgtagtaaagcgggacaagtctggtcattgaaaagattcattgcgtgccatcgaagcacgtcgctgcggtaaggtcggagaattgtgtccacctcctctgttgtaggcgcacgtggcggatcgatacccgctggaaggctatcccaatcttcggcccattcaaggggaataaattccatgtcgaggaactcagtgaccaacatttttcgttgctagtcgggggttttggtggaggagttattccagtttatctgcacaggattagcatctgaagtagaaacaaaaaggcacaacatacgataagatattgttcgacagccagtgtaccccatggaggaggaggcaaagaatccatgtcattcatcacgaggaaaggttaggaagcttaaagagaagataaaaggggaagatgcggaagagacaccggggaggggtgtggagagcggggctgatatggtgaggaacgcacaaatcattcctttaacctataatcctttgatacacacaagtgaatattaactacatgctcttactaactataacttagttaataccttgcctaaaagatggaaaacacaggtttaaagaggtagtgaatatcgcttttttcttatactcagcccgaagcaatcaccacccggcatttcgctggcacataccgcgcctaacctaaagtggctagaaatagcacgtgacagacacatcttacgggacttgaacggtccgtttgagctcttatggaccatacacggttaacaggcccagctttgaaaatgtggagagaatccgaggtctacattatacaatgcaacgatgacttcacctagtgcgttatatacctcccgcgtatgatagtagcaaacattcacattctccttcaaccctaattatgcgtatgtatcagctaggaacggaatagggaagaagatcggactagtcttatacactattgagcccaagactcatcacattttcgcagaggaaccgctatgcatgccagactaataggattccctcggctggcggcgagtaaatacagccatcttacagggggggggtgtatgtgtgtgaaatcatttaccctgagccctcgcgaacgatatgcagataccactactatatatatccgtgtacgtacatgtagagtgttccacttcctgaaaacgaacctagagcctcatcaaggcctggcgtggcttaattgcccttcccattattaggttgccccggtggcgcgcgactccgaaaccgttgtgacgcctcggcaaagtccagcacggccttgaccgtcctggctcgcgagacggtgtccggtttacctttctcaccttgttttgagcctcccagcaggctcgacacactattaagcgcatctccaacttctctcctcagctctctccgcggttccctcaagtttgggcaatccaccatcgcatgggtgactgtttcttgtgcgccgcatgcgcactggtcgtcgtcactataaatcaggatctcccgccccgggtacagttgagccagtgttccacgctggagtcgccatcgatgcacagattgatgttctcattgacccacaagccagcgttggtatcaagattggtggcggcaagattgttgcgggtaaaaccttgatggatgctcagctgagtggctatgtgaacaccgacgtctccttccaggctcatggtgactacgacacatctgacaatgcattccactaccgatttggggcatatctgtactataacattggttataaggcagtggccaagatcttagacttcgttgactgggcaacaggagatcgcacgtgaatcattagcgtatagatggtgcctattccattggcannnnnnnnnnnnnnnnnnnnnnnnnnnnnnnnnnnnnnnnnnnnnnnnnnnnnnnnnnnnnnnnnnnnnnnnnnnnnnnnnnnnnnnnnnnnnnnnnnnnnnnnnnnnnnnnnnnnnnnnnnnnnnnnnnnnnnnnnnnnnnnnnnnnnnnnnnnnnnnnnnnnnnnnnnnnnnnnnnnnnnnnnnnnnnnnnnnnnnnnnnnnnnnnnnnnnnnnnnnnnnnnnnnnnnnnnnnnnnnnnnnnnnnnnnnnnnnnnnnnnnnnnnnnnnnnnnnnnnnnnnnnnnnnnnnnnnnnnnnnnnnnnnnnnnnnnnnnnnnnnnnnnnnnnnnnnnnnnnnnnnnnnnnnnnnnnnnnnnnnnnnnnnnnnnnnnnnnnnnnnnnnnnnnnnnnnnnnnnnnnnnnnnnnnnnnnnnnnnnnnnnnnnnnnnnnnnnnnnnnnnnnnnnnnnnnnnnnnnnnnnnnnnnnnnnnnnnnnnnnnnnnnnnnnnnnnnnnnnnnnnnnnnnnnnnnnnnnnnnnnnnnnnnnnnnnnnnnnnnnnnnnnnnnnnnnnnnnnnnnnnnnnnnnnnnnnnnnnnnnnnnnnnnnnnnnnnnnnnnnnnnnnnnnnnnnnnnnnnnnnnnnnnnnnnnnnnnnnnnnnnnnnnnnnnnnnnnnnnnnnnnnnnnnnnnnnnnnnnnnnnnnnnnnnnnnnnnnnnnnnnnnnnnnnnnnnnnnnnnnnnnnnnnnnnnnnnnnnnnnnnnnnnnnnnnnnnnnnnnnnnnnnnnnnnnnnnnnnnnnnnnnnnnnnnnnnnnnnnnnnnnnnnnnnnnnnnnnnnnnnnnnnnnnnnnnnnnnnnnnnnnnnnnnnnnnnnnnnnnnnnnnnnnnnnnnnnnnnnnnnnnnnnnnnnnnnnnnnnnnnnnnnnnnnnnnnnnnnnnnnnnnnnnnnnnnnnnnnnnnnnnnnnnnnnnnnnnnnnnnnnnnnnnnnnnnnnnnnnnnnnnnnnnnnnnnnnnnnnnnnnnnnnnnnnnnnnnnnnnnnnnnnnnnnnnnnnnnnnnnnnnnnnnnnnnnnnnnnnnnnnnnnnnnnnnnnnnnnnnnnnnnnnnnnnnnnnnnnnnnnnnnnnnnnnnnnnnnnnnnnnnnnnnnnnnnnnnnnnnnnnnnnnnnnnnnnnnnnnnnnnnnnnnnnnnnnnnnnnnnnnnnnnnnnnnnnnnnnnnnnnnnnnnnnnnnnnnnnnnnnnnnnnnnnnnnnnnnnnnnnnnnnnnnnnnnnnnnnnnnnnnnnnnnnnnnnnnnnnnnnnnnnnnnnnnnnnnnnnnnnnnnnnnnnnnnnnnnnnnnnnnnnnnnnnnnnnnnnnnnnnnnnnnnnnnnnnnnnnnnnnnnnnnnnnnnnnnnnnnnnnnnnnnnnnnnnnnnnnnnnnnnnnnnnnnnnnnnnnnnnnnnnnnnnnnnnnnnnnnnnnnnnnnnnnnnnnnnnnnnnnnnnnnnnnnnnnnnnnnnnnnnnnnnnnnnnnnnnnnnnnnnnnnnnnnnnnnnnnnnnnnnnnnnnnnnnnnnnnnnnnnnnnnnnnnnnnnnnnnnnnnnnnnnnnnnnnnnnnnnnnnnnnnnnnnnnnnnnnnnnnnnnnnnnnnnnnnnnnnnnnnnnnnnnnnnnnnnnnnnnnnnnnnnnnnnnnnnnnnnnnnnnnnnnnnnnnnnnnnnnnnnnnnnnnnnnnnnnnnnnnnnnnnnnnnnnnnnnnnnnnnnnnnnnnnnnnnnnnnnnnnnnnnnnnnnnnnnnnnnnnnnnnnnnnnnnnnnnnnnnnnnnnnnnnnnnnnnnnnnnnnnnnnnnnnnnnnnnnnnnnnnnnnnnnnnnnnnnnnnnnnnnnnnnnnnnnnnnnnnnnnnnnnnnnnnnnnnnnnnnnnnnnnnnnnnnnnnnnnnnnnnnnnnnnnnnnnnnnnnnnnnnnnnnnnnnnnnnnnnnnnnnnnnnnnnnnnnnnnnnnnnnnnnnnnnnnnnnnnnnnnnnnnnnnnnnnnnnnnnnnnnnnnnnnnnnnnnnnnnnnnnnnnnnnnnnnnnnnnnnnnnnnnnnnnnnnnnnnnnnnnnnnnnnnnnnnnnnnnnnnnnnnnnnnnnnnnnnnnnnnnnnnnnnnnnnnnnnnnnnnnnnnnnnnnnnnnnnnnnnnnnnnnnnnnnnnnnnnnnnnnnnnnnnnnnnnnnnnnnnnnnnnnnnnnnnnnnnnnnnnnnnnnnnnnnnnnnnnnnnnnnnnnnnnnnnnnnnnnnnnnnnnnnnnnnnnnnnnnnnnnnnnnnnnnnnnnnnnnnnnnnnnnnnnnnnnnnnnnnnnnnnnnnnnnnnnnnnnnnnnnnnnnnnnnnnnnnnnnnnnnnnnnnnnnnnnnnnnnnnnnnnnnnnnnnnnnnnnnnnnnnnnnnnnnnnnnnnnnnnnnnnnnnnnnnnnnnnnnnnnnnnnnnnnnnnnnnnnnnnnnnnnnnnnnnnnnnnnnnnnnnnnnnnnnnnnnnnnnnnnnnnnnnnnnnnnnnnnnnnnnnnnnnnnnnnnnnnnnnnnnnnnnnnnnnnnnnnnnnnnnnnnnnnnnnnnnnnnnnnnnnnnnnnnnnnnnnnnnnnnnnnnnnnnnnnnnnnnnnnnnnnnnnnnnnnnnnnnnnnnnnnnnnnnnnnnnnnnnnnnnnnnnnnnnnnnnnnnnnnnnnnnnnnnnnnnnnnnnnnnnnnnnnnnnnnnnnnnnnnnnnnnnnnnnnnnnnnnnnnnnnnnnnnnnnnnnnnnnnnnnnnnnnnnnnnnnnnnnnnnnnnnnnnnnnnnnnnnnnnnnnnnnnnnnnnnnnnnnnnnnnnnnnnnnnnnnnnnnnnnnnnnnnnnnnnnnnnnnnnnnnnnnnnnnnnnnnnnnnnnnnnnnnnnnnnnnnnnnnnnnnnnnnnnnnnnnnnnnnnnnnnnnnnnnnnnnnnnnnnnnnnnnnnnnnnnnnnnnnnnnnnnnnnnnnnnnnnnnnnnnnnnnnnnnnnnnnnnnnnnnnnnnnnnnnnnnnnnnnnnnnnnnnnnnnnnnnnnnnnnnnnnnnnnnnnnnnnnnnnnnnnnnnnnnnnnnnnnnnnnnnnnnnnnnnnnnnnnnnnnnnnnnnnnnnnnnnnnnnnnnnnnnnnnnnnnnnnnnnnnnnnnnnnnnnnnnnnnnnnnnnnnnnnnnnnnnnnnnnnnnnnnnnnnnnnnnnnnnnnnnnnnnnnnnnnnnnnnnnnnnnnnnnnnnnnnnnnnnnnnnnnnnnnnnnnnnnnnnnnnnnnnnnnnnnnnnnnnnnnnnnnnnnnnnnnnnnnnnnnnnnnnnnnnnnnnnnnnnnnnnnnnnnnnnnnnnnnnnnnnnnnnnnnnnnnnnnnnnnnnnnnnnnnnnnnnnnnnnnnnnnnnnnnnnnnnnnnnnnnnnnnnnnnnnnnnnnnnnnnnnnnnnnnnnnnnnnnnnnnnnnnnnnnnnnnnnnnnnnnnnnnnnnnnnnnnnnnnnnnnnnnnnnnnnnnnnnnnnnnnnnnnnnnnnnnnnnnnnnnnnnnnnnnnnnnnnnnnnnnnnnnnnnnnnnnnnnnnnnnnnnnnnnnnnnnnnnnnnnnnnnnnnnnnnnnnnnnnnnnnnnnnnnnnnnnnnnnnnnnnnnnnnnnnnnnnnnnnnnnnnnnnnnnnnnnnnnnnnnnnnnnnnnnnnnnnnnnnnnnnnnnnnnnnnnnnnnnnnnnnnnnnnnnnnnnnnnnnnnnnnnnnnnnnnnnnnnnnnnnnnnnnnnnnnnnnnnnnnnnnnnnnnnnnnnnnnnnnnnnnnnnnnnnnnnnnnnnnnnnnnnnnnnnnnnnnnnnnnnnnnnnnnnnnnnnnnnnnnnnnnnnnnnnnnnnnnnnnnnnnnnnnnnnnnnnnnnnnnnnnnnnnnnnnnnnnnnnnnnnnnnnnnnnnnnnnnnnnnnnnnnnnnnnnnnnnnnnnnnnnnnnnnnnnnnnnnnnnnnnnnnnnnnnnnnnnnnnnnnnnnnnnnnnnnnnnnnnnnnnnnnnnnnnnnnnnnnnnnnnnnnnnnnnnnnnnnnnnnnnnnnnnnnnnnnnnnnnnnnnnnnnnnnnnnnnnnnnnnnnnnnnnnnnnnnnnnnnnnnnnnnnnnnnnnnnnnnnnnnnnnnnnnnnnnnnnnnnnnnnnnnnnnnnnnnnnnnnnnnnnnnnnnnnnnnnnnnnnnnnnnnnnnnnnnnnnnnnnnnnnnnnnnnnnnnnnnnnnnnnnnnnnnnnnnnnnnnnnnnnnnnnnnnnnnnnnnnnnnnnnnnnnnnnnnnnnnnnnnnnnnnnnnnnnnnnnnnnnnnnnnnnnnnnnnnnnnnnnnnnnnnnnnnnnnnnnnnnnnnnnnnnnnnnnnnnnnnnnnnnnnnnnnnnnnnnnnnnnnnnnnnnnnnnnnnnnnnnnnnnnnnnnnnnnnnnnnnnnnnnnnnnnnnnnnnnnnnnnnnnnnnnnnnnnnnnnnnnnnnnnnnnnnnnnnnnnnnnnnnnnnnnnnnnnnnnnnnnnnnnnnnnnnnnnnnnnnnnnnnnnnnnnnnnnnnnnnnnnnnnnnnnnnnnnnnnnnnnnnnnnnnnnnnnnnnnnnnnnnnnnnnnnnnnnnnnnnnnnnnnnnnnnnnnnnnnnnnnnnnnnnnnnnnnnnnnnnnnnnnnnnnnnnnnnnnnnnnnnnnnnnnnnnnnnnnnnnnnnnnnnnnnnnnnnnnnnnnnnnnnnnnnnnnnnnnnnnnnnnnnnnnnnnnnnnnnnnnnnnnnnnnnnnnnnnnnnnnnnnnnnnnnnnnnnnnnnnnnnnnnnnnnnnnnnnnnnnnnnnnnnnnnnnnnnnnnnnnnnnnnnnnnnnnnnnnnnnnnnnnnnnnnnnnnnnnnnnnnnnnnnnnnnnnnnnnnnnnnnnnnnnnnnnnnnnnnnnnnnnnnnnnnnnnnnnnnnnnnnnnnnnnnnnnnnnnnnnnnnnnnnnnnnnnnnnnnnnnnnnnnnnnnnnnnnnnnnnnnnnnnnnnnnnnnnnnnnnnnnnnnnnnnnnnnnnnnnnnnnnnnnnnnnnnnnnnnnnnnnnnnnnnnnnnnnnnnnnnnnnnnnnnnnnnnnnnnnnnnnnnnnnnnnnnnnnnnnnnnnnnnnnnnnnnnnnnnnnnnnnnnnnnnnnnnnnnnnnnnnnnnnnnnnnnnnnnnnnnnnnnnnnnnnnnnnnnnnnnnnnnnnnnnnnnnnnnnnnnnnnnnnnnnnnnnnnnnnnnnnnnnnnnnnnnnnnnnnnnnnnnnnnnnnnnnnnnnnnnnnnnnnnnnnnnnnnnnnnnnnnnnnnnnnnnnnnnnnnnnnnnnnnnnnnnnnnnnnnnnnnnnnnnnnnnnnnnnnnnnnnnnnnnnnnnnnnnnnnnnnnnnnnnnnnnnnnnnnnnnnnnnnnnnnnnnnnnnnnnnnnnnnnnnnnnnnnnnnnnnnnnnnnnnnnnnnnnnnnnnnnnnnnnnnnnnnnnnnnnnnnnnnnnnnnnnnnnnnnnnnnnnnnnnnnnnnnnnnnnnnnnnnnnnnnnnnnnnnnnnnnnnnnnnnnnnnnnnnnnnnnnnnnnnnnnnnnnnnnnnnnnnnnnnnnnnnnnnnnnnnnnnnnnnnnnnnnnnnnnnnnnnnnnnnnnnnnnnnnnnnnnnnnnnnnnnnnnnnnnnnnnnnnnnnnnnnnnnnnnnnnnnnnnnnnnnnnnnnnnnnnnnnnnnnnnnnnnnnnnnnnnnnnnnnnnnnnnnnnnnnnnnnnnnnnnnnnnnnnnnnnnnnnnnnnnnnnnnnnnnnnnnnnnnnnnnnnnnnnnnnnnnnnnnnnnnnnnnnnnnnnnnnnnnnnnnnnnnnnnnnnnnnnnnnnnnnnnnnnnnnnnnnnnnnnnnnnnnnnnnnnnnnnnnnnnnnnnnnnnnnnnnnnnnnnnnnnnnnnnnnnnnnnnnnnnnnnnnnnnnnnnnnnnnnnnnnnnnnnnnnnnnnnnnnnnnnnnnnnnnnnnnnnnnnnnnnnnnnnnnnnnnnnnnnnnnnnnnnnnnnnnnnnnnnnnnnnnnnnnnnnnnnnnnnnnnnnnnnnnnnnnnnnnnnnnnnnnnnnnnnnnnnnnnnnnnnnnnnnnnnnnnnnnnnnnnnnnnnnnnnnnnnnnnnnnnnnnnnnnnnnnnnnnnnnnnnnnnnnnnnnnnnnnnnnnnnnnnnnnnnnnnnnnnnnnnnnnnnnnnnnnnnnnnnnnnnnnnnnnnnnnnnnnnnnnnnnnnnnnnnnnnnnnnnnnnnnnnnnnnnnnnnnnnnnnnnnnnnnnnnnnnnnnnnnnnnnnnnnnnnnnnnnnnnnnnnnnnnnnnnnnnnnnnnnnnnnnnnnnnnnnnnnnnnnnnnnnnnnnnnnnnnnnnnnnnnnnnnnnnnnnnnnnnnnnnnnnnnnnnnnnnnnnnnnnnnnnnnnnnnnnnnnnnnnnnnnnnnnnnnnnnnnnnnnnnnnnnnnnnnnnnnnnnnnnnnnnnnnnnnnnnnnnnnnnnnnnnnnnnnnnnnnnnnnnnnnnnnnnnnnnnnnnnnnnnnnnnnnnnnnnnnnnnnnnnnnnnnnnnnnnnnnnnnnnnnnnnnnnnnnnnnnnnnnnnnnnnnnnnnnnnnnnnnnnnnnnnnnnnnnnnnnnnnnnnnnnnnnnnnnnnnnnnnnnnnnnnnnnnnnnnnnnnnnnnnnnnnnnnnnnnnnnnnnnnnnnnnnnnnnnnnnnnnnnnnnnnnnnnnnnnnnnnnnnnnnnnnnnnnnnnnnnnnnnnnnnnnnnnnnnnnnnnnnnnnnnnnnnnnnnnnnnnnnnnnnnnnnnnnnnnnnnnnnnnnnnnnnnnnnnnnnnnnnnnnnnnnnnnnnnnnnnnnnnnnnnnnnnnnnnnnnnnnnnnnnnnnnnnnnnnnnnnnnnnnnnnnnnnnnnnnnnnnnnnnnnnnnnnnnnnnnnnnnnnnnnnnnnnnnnnnnnnnnnnnnnnnnnnnnnnnnnnnnnnnnnnnnnnnnnnnnnnnnnnnnnnnnnnnnnnnnnnnnnnnnnnnnnnnnnnnnnnnnnnnnnnnnnnnnnnnnnnnnnnnnnnnnnnnnnnnnnnnnnnnnnnnnnnnnnnnnnnnnnnnnnnnnnnnnnnnnnnnnnnnnnnnnnnnnnnnnnnnnnnnnnnnnnnnnnnnnnnnnnnnnnnnnnnnnnnnnnnnnnnnnnnnnnnnnnnnnnnnnnnnnnnnnnnnnnnnnnnnnnnnnnnnnnnnnnnnnnnnnnnnnnnnnnnnnnnnnnnnnnnnnnnnnnnnnnnnnnnnnnnnnnnnnnnnnnnnnnnnnnnnnnnnnnnnnnnnnnnnnnnnnnnnnnnnnnnnnnnnnnnnnnnnnnnnnnnnnnnnnnnnnnnnnnnnnnnnnnnnnnnnnnnnnnnnnnnnnnnnnnnnnnnnnnnnnnnnnnnnnnnnnnnnnnnnnnnnnnnnnnnnnnnnnnnnnnnnnnnnnnnnnnnnnnnnnnnnnnnnnnnnnnnnnnnnnnnnnnnnnnnnnnnnnnnnnnnnnnnnnnnnnnnnnnnnnnnnnnnnnnnnnnnnnnnnnnnnnnnnnnnnnnnnnnnnnnnnnnnnnnnnnnnnnnnnnnnnnnnnnnnnnnnnnnnnnnnnnnnnnnnnnnnnnnnnnnnnnnnnnnnnnnnnnnnnnnnnnnnnnnnnnnnnnnnnnnnnnnnnnnnnnnnnnnnnnnnnnnnnnnnnnnnnnnnnnnnnnnnnnnnnnnnnnnnnnnnnnnnnnnnnnnnnnnnnnnnnnnnnnnnnnnnnnnnnnnnnnnnnnnnnnnnnnnnnnnnnnnnnnnnnnnnnnnnnnnnnnnnnnnnnnnnnnnnnnnnnnnnnnnnnnnnnnnnnnnnnnnnnnnnnnnnnnnnnnnnnnnnnnnnnnnnnnnnnnnnnnnnnnnnnnnnnnnnnnnnnnnnnnnnnnnnnnnnnnnnnnnnnnnnnnnnnnnnnnnnnnnnnnnnnnnnnnnnnnnnnnnnnnnnnnnnnnnnnnnnnnnnnnnnnnnnnnnnnnnnnnnnnnnnnnnnnnnnnnnnnnnnnnnnnnnnnnnnnnnnnnnnnnnnnnnnnnnnnnnnnnnnnnnnnnnnnnnnnnnnnnnnnnnnnnnnnnnnnnnnnnnnnnnnnnnnnnnnnnnnnnnnnnnnnnnnnnnnnnnnnnnnnnnnnnnnnnnnnnnnnnnnnnnnnnnnnnnnnnnnnnnnnnnnnnnnnnnnnnnnnnnnnnnnnnnnnnnnnnnnnnnnnnnnnnnnnnnnnnnnnnnnnnnnnnnnnnnnnnnnnnnnnnnnnnnnnnnnnnnnnnnnnnnnnnnnnnnnnnnnnnnnnnnnnnnnnnnnnnnnnnnnnnnnnnnnnnnnnnnnnnnnnnnnnnnnnnnnnnnnnnnnnnnnnnnnnnnnnnnnnnnnnnnnnnnnnnnnnnnnnnnnnnnnnnnnnnnnnnnnnnnnnnnnnnnnnnnnnnnnnnnnnnnnnnnnnnnnnnnnnnnnnnnnnnnnnnnnnnnnnnnnnnnnnnnnnnnnnnnnnnnnnnnnnnnnnnnnnnnnnnnnnnnnnnnnnnnnnnnnnnnnnnnnnnnnnnnnnnnnnnnnnnnnnnnnnnnnnnnnnnnnnnnnnnnnnnnnnnnnnnnnnnnnnnnnnnnnnnnnnnnnnnnnnnnnnnnnnnnnnnnnnnnnnnnnnnnnnnnnnnnnnnnnnnnnnnnnnnnnnnnnnnnnnnnnnnnnnnnnnnnnnnnnnnnnnnnnnnnnnnnnnnnnnnnnnnnnnnnnnnnnnnnnnnnnnnnnnnnnnnnnnnnnnnnnnnnnnnnnnnnnnnnnnnnnnnnnnnnnnnnnnnnnnnnnnnnnnnnnnnnnnnnnnnnnnnnnnnnnnnnnnnnnnnnnnnnnnnnnnnnnnnnnnnnnnnnnnnnnnnnnnnnnnnnnnnnnnnnnnnnnnnnnnnnnnnnnnnnnnnnnnnnnnnnnnnnnnnnnnnnnnnnnnnnnnnnnnnnnnnnnnnnnnnnnnnnnnnnnnnnnnnnnnnnnnnnnnnnnnnnnnnnnnnnnnnnnnnnnnnnnnnnnnnnnnnnnnnnnnnnnnnnnnnnnnnnnnnnnnnnnnnnnnnnnnnnnnnnnnnnnnnnnnnnnnnnnnnnnnnnnnnnnnnnnnnnnnnnnnnnnnnnnnnnnnnnnnnnnnnnnnnnnnnnnnnnnnnnnnnnnnnnnnnnnnnnnnnnnnnnnnnnnnnnnnnnnnnnnnnnnnnnnnnnnnnnnnnnnnnnnnnnnnnnnnnnnnnnnnnnnnnnnnnnnnnnnnnnnnnnnnnnnnnnnnnnnnnnnnnnnnnnnnnnnnnnnnnnnnnnnnnnnnnnnnnnnnnnnnnnnnnnnnnnnnnnnnnnnnnnnnnnnnnnnnnnnnnnnnnnnnnnnnnnnnnnnnnnnnnnnnnnnnnnnnnnnnnnnnnnnnnnnnnnnnnnnnnnnnnnnnnnnnnnnnnnnnnnnnnnnnnnnnnnnnnnnnnnnnnnnnnnnnnnnnnnnnnnnnnnnnnnnnnnnnnnnnnnnnnnnnnnnnnnnnnnnnnnnnnnnnnnnnnnnnnnnnnnnnnnnnnnnnnnnnnnnnnnnnnnnnnnnnnnnnnnnnnnnnnnnnnnnnnnnnnnnnnnnnnnnnnnnnnnnnnnnnnnnnnnnnnnnnnnnnnnnnnnnnnnnnnnnnnnnnnnnnnnnnnnnnnnnnnnnnnnnnnnnnnnnnnnnnnnnnnnnnnnnnnnnnnnnnnnnnnnnnnnnnnnnnnnnnnnnnnnnnnnnnnnnnnnnnnnnnnnnnnnnnnnnnnnnnnnnnnnnnnnnnnnnnnnnnnnnnnnnnnnnnnnnnnnnnnnnnnnnnnnnnnnnnnnnnnnnnnnnnnnnnnnnnnnnnnnnnnnnnnnnnnnnnnnnnnnnnnnnnnnnnnnnnnnnnnnnnnnnnnnnnnnnnnnnnnnnnnnnnnnnnnnnnnnnnnnnnnnnnnnnnnnnnnnnnnnnnnnnnnnnnnnnnnnnnnnnnnnnnnnnnnnnnnnnnnnnnnnnnnnnnnnnnnnnnnnnnnnnnnnnnnnnnnnnnnnnnnnnnnnnnnnnnnnnnnnnnnnnnnnnnnnnnnnnnnnnnnnnnnnnnnnnnnnnnnnnnnnnnnnnnnnnnnnnnnnnnnnnnnnnnnnnnnnnnnnnnnnnnnnnnnnnnnnnnnnnnnnnnnnnnnnnnnnnnnnnnnnnnnnnnnnnnnnnnnnnnnnnnnnnnnnnnnnnnnnnnnnnnnnnnnnnnnnnnnnnnnnnnnnnnnnnnnnnnnnnnnnnnnnnnnnnnnnnnnnnnnnnnnnnnnnnnnnnnnnnnnnnnnnnnnnnnnnnnnnnnnnnnnnnnnnnnnnnnnnnnnnnnnnnnnnnnnnnnnnnnnnnnnnnnnnnnnnnnnnnnnnnnnnnnnnnnnnnnnnnnnnnnnnnnnnnnnnnnnnnnnnnnnnnnnnnnnnnnnnnnnnnnnnnnnnnnnnnnnnnnnnnnnnnnnnnnnnnnnnnnnnnnnnnnnnnnnnnnnnnnnnnnnnnnnnnnnnnnnnnnnnnnnnnnnnnnnnnnnnnnnnnnnnnnnnnnnnnnnnnnnnnnnnnnnnnnnnnnnnnnnnnnnnnnnnnnnnnnnnnnnnnnnnnnnnnnnnnnnnnnnnnnnnnnnnnnnnnnnnnnnnnnnnnnnnnnnnnnnnnnnnnnnnnnnnnnnnnnnnnnnnnnnnnnnnnnnnnnnnnnnnnnnnnnnnnnnnnnnnnnnnnnnnnnnnnnnnnnnnnnnnnnnnnnnnnnnnnnnnnnnnnnnnnnnnnnnnnnnnnnnnnnnnnnnnnnnnnnnnnnnnnnnnnnnnnnnnnnnnnnnnnnnnnnnnnnnnnnnnnnnnnnnnnnnnnnnnnnnnnnnnnnnnnnnnnnnnnnnnnnnnnnnnnnnnnnnnnnnnnnnnnnnnnnnnnnnnnnnnnnnnnnnnnnnnnnnnnnnnnnnnnnnnnnnnnnnnnnnnnnnnnnnnnnnnnnnnnnnnnnnnnnnnnnnnnnnnnnnnnnnnnnnnnnnnnnnnnnnnnnnnnnnnnnnnnnnnnnnnnnnnnnnnnnnnnnnnnnnnnnnnnnnnnnnnnnnnnnnnnnnnnnnnnnnnnnnnnnnnnnnnnnnnnnnnnnnnnnnnnnnnnnnnnnnnnnnnnnnnnnnnnnnnnnnnnnnnnnnnnnnnnnnnnnnnnnnnnnnnnnnnnnnnnnnnnnnnnnnnnnnnnnnnnnnnnnnnnnnnnnnnnnnnnnnnnnnnnnnnnnnnnnnnnnnnnnnnnnnnnnnnnnnnnnnnnnnnnnnnnnnnnnnnnnnnnnnnnnnnnnnnnnnnnnnnnnnnnnnnnnnnnnnnnnnnnnnnnnnnnnnnnnnnnnnnnnnnnnnnnnnnnnnnnnnnnnnnnnnnnnnnnnnnnnnnnnnnnnnnnnnnnnnnnnnnnnnnnnnnnnnnnnnnnnnnnnnnnnnnnnnnnnnnnnnnnnnnnnnnnnnnnnnnnnnnnnnnnnnnnnnnnnnnnnnnnnnnnnnnnnnnnnnnnnnnnnnnnnnnnnnnnnnnnnnnnnnnnnnnnnnnnnnnnnnnnnnnnnnnnnnnnnnnnnnnnnnnnnnnnnnnnnnnnnnnnnnnnnnnnnnnnnnnnnnnnnnnnnnnnnnnnnnnnnnnnnnnnnnnnnnnnnnnnnnnnnnnnnnnnnnnnnnnnnnnnnnnnnnnnnnnnnnnnnnnnnnnnnnnnnnnnnnnnnnnnnnnnnnnnnnnnnnnnnnnnnnnnnnnnnnnnnnnnnnnnnnnnnnnnnnnnnnnnnnnnnnnnnnnnnnnnnnnnnnnnnnnnnnnnnnnnnnnnnnnnnnnnnnnnnnnnnnnnnnnnnnnnnnnnnnnnnnnnnnnnnnnnnnnnnnnnnnnnnnnnnnnnnnnnnnnnnnnnnnnnnnnnnnnnnnnnnnnnnnnnnnnnnnnnnnnnnnnnnnnnnnnnnnnnnnnnnnnnnnnnnnnnnnnnnnnnnnnnnnnnnnnnnnnnnnnnnnnnnnnnnnnnnnnnnnnnnnnnnnnnnnnnnnnnnnnnnnnnnnnnnnnnnnnnnnnnnnnnnnnnnnnnnnnnnnnnnnnnnnnnnnnnnnnnnnnnnnnnnnnnnnnnnnnnnnnnnnnnnnnnnnnnnnnnnnnnnnnnnnnnnnnnnnnnnnnnnnnnnnnnnnnnnnnnnnnnnnnnnnnnnnnnnnnnnnnnnnnnnnnnnnnnnnnnnnnnnnnnnnnnnnnnnnnnnnnnnnnnnnnnnnnnnnnnnnnnnnnnnnnnnnnnnnnnnnnnnnnnnnnnnnnnnnnnnnnnnnnnnnnnnnnnnnnnnnnnnnnnnnnnnnnnnnnnnnnnnnnnnnnnnnnnnnnnnnnnnnnnnnnnnnnnnnnnnnnnnnnnnnnnnnnnnnnnnnnnnnnnnnnnnnnnnnnnnnnnnnnnnnnnnnnnnnnnnnnnnnnnnnnnnnnnnnnnnnnnnnnnnnnnnnnnnnnnnnnnnnnnnnnnnnnnnnnnnnnnnnnnnnnnnnnnnnnnnnnnnnnnnnnnnnnnnnnnnnnnnnnnnnnnnnnnnnnnnnnnnnnnnnnnnnnnnnnnnnnnnnnnnnnnnnnnnnnnnnnnnnnnnnnnnnnnnnnnnnnnnnnnnnnnnnnnnnnnnnnnnnnnnnnnnnnnnnnnnnnnnnnnnnnnnnnnnnnnnnnnnnnnnnnnnnnnnnnnnnnnnnnnnnnnnnnnnnnnnnnnnnnnnnnnnnnnnnnnnnnnnnnnnnnnnnnnnnnnnnnnnnnnnnnnnnnnnnnnnnnnnnnnnnnnnnnnnnnnnnnnnnnnnnnnnnnnnnnnnnnnnnnnnnnnnnnnnnnnnnnnnnnnnnnnnnnnnnnnnnnnnnnnnnnnnnnnnnnnnnnnnnnnnnnnnnnnnnnnnnnnnnnnnnnnnnnnnnnnnnnnnnnnnnnnnnnnnnnnnnnnnnnnnnnnnnnnnnnnnnnnnnnnnnnnnnnnnnnnnnnnnnnnnnnnnnnnnnnnnnnnnnnnnnnnnnnnnnnnnnnnnnnnnnnnnnnnnnnnnnnnnnnnnnnnnnnnnnnnnnnnnnnnnnnnnnnnnnnnnnnnnnnnnnnnnnnnnnnnnnnnnnnnnnnnnnnnnnnnnnnnnnnnnnnnnnnnnnnnnnnnnnnnnnnnnnnnnnnnnnnnnnnnnnnnnnnnnnnnnnnnnnnnnnnnnnnnnnnnnnnnnnnnnnnnnnnnnnnnnnnnnnnnnnnnnnnnnnnnnnnnnnnnnnnnnnnnnnnnnnnnnnnnnnnnnnnnnnnnnnnnnnnnnnnnnnnnnnnnnnnnnnnnnnnnnnnnnnnnnnnnnnnnnnnnnnnnnnnnnnnnnnnnnnnnnnnnnnnnnnnnnnnnnnnnnnnnnnnnnnnnnnnnnnnnnnnnnnnnnnnnnnnnnnnnnnnnnnnnnnnnnnnnnnnnnnnnnnnnnnnnnnnnnnnnnnnnnnnnnnnnnnnnnnnnnnnnnnnnnnnnnnnnnnnnnnnnnnnnnnnnnnnnnnnnnnnnnnnnnnnnnnnnnnnnnnnnnnnnnnnnnnnnnnnnnnnnnnnnnnnnnnnnnnnnnnnnnnnnnnnnnnnnnnnnnnnnnnnnnnnnnnnnnnnnnnnnnnnnnnnnnnnnnnnnnnnnnnnnnnnnnnnnnnnnnnnnnnnnnnnnnnnnnnnnnnnnnnnnnnnnnnnnnnnnnnnnnnnnnnnnnnnnnnnnnnnnnnnnnnnnnnnnnnnnnnnnnnnnnnnnnnnnnnnnnnnnnnnnnnnnnnnnnnnnnnnnnnnnnnnnnnnnnnnnnnnnnnnnnnnnnnnnnnnnnnnnnnnnnnnnnnnnnnnnnnnnnnnnnnnnnnnnnnnnnnnnnnnnnnnnnnnnnnnnnnnnnnnnnnnnnnnnnnnnnnnnnnnnnnnnnnnnnnnnnnnnnnnnnnnnnnnnnnnnnnnnnnnnnnnnnnnnnnnnnnnnnnnnnnnnnnnnnnnnnnnnnnnnnnnnnnnnnnnnnnnnnnnnnnnnnnnnnnnnnnnnnnnnnnnnnnnnnnnnnnnnnnnnnnnnnnnnnnnnnnnnnnnnnnnnnnnnnnnnnnnnnnnnnnnnnnnnnnnnnnnnnnnnnnnnnnnnnnnnnnnnnnnnnnnnnnnnnnnnnnnnnnnnnnnnnnnnnnnnnnnnnnnnnnnnnnnnnnnnnnnnnnnnnnnnnnnnnnnnnnnnnnnnnnnnnnnnnnnnnnnnnnnnnnnnnnnnnnnnnnnnnnnnnnnnnnnnnnnnnnnnnnnnnnnnnnnnnnnnnnnnnnnnnnnnnnnnnnnnnnnnnnnnnnnnnnnnnnnnnnnnnnnnnnnnnnnnnnnnnnnnnnnnnnnnnnnnnnnnnnnnnnnnnnnnnnnnnnnnnnnnnnnnnnnnnnnnnnnnnnnnnnnnnnnnnnnnnnnnnnnnnnnnnnnnnnnnnnnnnnnnnnnnnnnnnnnnnnnnnnnnnnnnnnnnnnnnnnnnnnnnnnnnnnnnnnnnnnnnnnnnnnnnnnnnnnnnnnnnnnnnnnnnnnnnnnnnnnnnnnnnnnnnnnnnnnnnnnnnnnnnnnnnnnnnnnnnnnnnnnnnnnnnnnnnnnnnnnnnnnnnnnnnnnnnnnnnnnnnnnnnnnnnnnnnnnnnnnnnnnnnnnnnnnnnnnnnnnnnnnnnnnnnnnnnnnnnnnnnnnnnnnnnnnnnnnnnnnnnnnnnnnnnnnnnnnnnnnnnnnnnnnnnnnnnnnnnnnnnnnnnnnnnnnnnnnnnnnnnnnnnnnnnnnnnnnnnnnnnnnnnnnnnnnnnnnnnnnnnnnnnnnnnnnnnnnnnnnnnnnnnnnnnnnnnnnnnnnnnnnnnnnnnnnnnnnnnnnnnnnnnnnnnnnnnnnnnnnnnnnnnnnnnnnnnnnnnnnnnnnnnnnnnnnnnnnnnnnnnnnnnnnnnnnnnnnnnnnnnnnnnnnnnnnnnnnnnnnnnnnnnnnnnnnnnnnnnnnnnnnnnnnnnnnnnnnnnnnnnnnnnnnnnnnnnnnnnnnnnnnnnnnnnnnnnnnnnnnnnnnnnnnnnnnnnnnnnnnnnnnnnnnnnnnnnnnnnnnnnnnnnnnnnnnnnnnnnnnnnnnnnnnnnnnnnnnnnnnnnnnnnnnnnnnnnnnnnnnnnnnnnnnnnnnnnnnnnnnnnnnnnnnnnnnnnnnnnnnnnnnnnnnnnnnnnnnnnnnnnnnnnnnnnnnnnnnnnnnnnnnnnnnnnnnnnnnnnnnnnnnnnnnnnnnnnnnnnnnnnnnnnnnnnnnnnnnnnnnnnnnnnnnnnnnnnnnnnnnnnnnnnnnnnnnnnnnnnnnnnnnnnnnnnnnnnnnnnnnnnnnnnnnnnnnnnnnnnnnnnnnnnnnnnnnnnnnnnnnnnnnnnnnnnnnnnnnnnnnnnnnnnnnnnnnnnnnnnnnnnnnnnnnnnnnnnnnnnnnnnnnnnnnnnnnnnnnnnnnnnnnnnnnnnnnnnnnnnnnnnnnnnnnnnnnnnnnnnnnnnnnnnnnnnnnnnnnnnnnnnnnnnnnnnnnnnnnnnnnnnnnnnnnnnnnnnnnnnnnnnnnnnnnnnnnnnnnnnnnnnnnnnnnnnnnnnnnnnnnnnnnnnnnnnnnnnnnnnnnnnnnnnnnnnnnnnnnnnnnnnnnnnnnnnnnnnnnnnnnnnnnnnnnnnnnnnnnnnnnnnnnnnnnnnnnnnnnnnnnnnnnnnnnnnnnnnnnnnnnnnnnnnnnnnnnnnnnnnnnnnnnnnnnnnnnnnnnnnnnnnnnnnnnnnnnnnnnnnnnnnnnnnnnnnnnnnnnnnnnnnnnnnnnnnnnnnnnnnnnnnnnnnnnnnnnnnnnnnnnnnnnnnnnnnnnnnnnnnnnnnnnnnnnnnnnnnnnnnnnnnnnnnnnnnnnnnnnnnnnnnnnnnnnnnnnnnnnnnnnnnnnnnnnnnnnnnnnnnnnnnnnnnnnnnnnnnnnnnnnnnnnnnnnnnnnnnnnnnnnnnnnnnnnnnnnnnnnnnnnnnnnnnnnnnnnnnnnnnnnnnnnnnnnnnnnnnnnnnnnnnnnnnnnnnnnnnnnnnnnnnnnnnnnnnnnnnnnnnnnnnnnnnnnnnnnnnnnnnnnnnnnnnnnnnnnnnnnnnnnnnnnnnnnnnnnnnnnnnnnnnnnnnnnnnnnnnnnnnnnnnnnnnnnnnnnnnnnnnnnnnnnnnnnnnnnnnnnnnnnnnnnnnnnnnnnnnnnnnnnnnnnnnnnnnnnnnnnnnnnnnnnnnnnnnnnnnnnnnnnnnnnnnnnnnnnnnnnnnnnnnnnnnnnnnnnnnnnnnnnnnnnnnnnnnnnnnnnnnnnnnnnnnnnnnnnnnnnnnnnnnnnnnnnnnnnnnnnnnnnnnnnnnnnnnnnnnnnnnnnnnnnnnnnnnnnnnnnnnnnnnnnnnnnnnnnnnnnnnnnnnnnnnnnnnnnnnnnnnnnnnnnnnnnnnnnnnnnnnnnnnnnnnnnnnnnnnnnnnnnnnnnnnnnnnnnnnnnnnnnnnnnnnnnnnnnnnnnnnnnnnnnnnnnnnnnnnnnnnnnnnnnnnnnnnnnnnnnnnnnnnnnnnnnnnnnnnnnnnnnnnnnnnnnnnnnnnnnnnnnnnnnnnnnnnnnnnnnnnnnnnnnnnnnnnnnnnnnnnnnnnnnnnnnnnnnnnnnnnnnnnnnnnnnnnnnnnnnnnnnnnnnnnnnnnnnnnnnnnnnnnnnnnnnnnnnnnnnnnnnnnnnnnnnnnnnnnnnnnnnnnnnnnnnnnnnnnnnnnnnnnnnnnnnnnnnnnnnnnnnnnnnnnnnnnnnnnnnnnnnnnnnnnnnnnnnnnnnnnnnnnnnnnnnnnnnnnnnnnnnnnnnnnnnnnnnnnnnnnnnnnnnnnnnnnnnnnnnnnnnnnnnnnnnnnnnnnnnnnnnnnnnnnnnnnnnnnnnnnnnnnnnnnnnnnnnnnnnnnnnnnnnnnnnnnnnnnnnnnnnnnnnnnnnnnnnnnnnnnnnnnnnnnnnnnnnnnnnnnnnnnnnnnnnnnnnnnnnnnnnnnnnnnnnnnnnnnnnnnnnnnnnnnnnnnnnnnnnnnnnnnnnnnnnnnnnnnnnnnnnnnnnnnnnnnnnnnnnnnnnnnnnnnnnnnnnnnnnnnnnnnnnnnnnnnnnnnnnnnnnnnnnnnnnnnnnnnnnnnnnnnnnnnnnnnnnnnnnnnnnnnnnnnnnnnnnnnnnnnnnnnnnnnnnnnnnnnnnnnnnnnnnnnnnnnnnnnnnnnnnnnnnnnnnnnnnnnnnnnnnnnnnnnnnnnnnnnnnnnnnnnnnnnnnnnnnnnnnnnnnnnnnnnnnnnnnnnnnnnnnnnnnnnnnnnnnnnnnnnnnnnnnnnnnnnnnnnnnnnnnnnnnnnnnnnnnnnnnnnnnnnnnnnnnnnnnnnnnnnnnnnnnnnnnnnnnnnnnnnnnnnnnnnnnnnnnnnnnnnnnnnnnnnnnnnnnnnnnnnnnnnnnnnnnnnnnnnnnnnnnnnnnnnnnnnnnnnnnnnnnnnnnnnnnnnnnnnnnnnnnnnnnnnnnnnnnnnnnnnnnnnnnnnnnnnnnnnnnnnnnnnnnnnnnnnnnnnnnnnnnnnnnnnnnnnnnnnnnnnnnnnnnnnnnnnnnnnnnnnnnnnnnnnnnnnnnnnnnnnnnnnnnnnnnnnnnnnnnnnnnnnnnnnnnnnnnnnnnnnnnnnnnnnnnnnnnnnnnnnnnnnnnnnnnnnnnnnnnnnnnnnnnnnnnnnnnnnnnnnnnnnnnnnnnnnnnnnnnnnnnnnnnnnnnnnnnnnnnnnnnnnnnnnnnnnnnnnnnnnnnnnnnnnnnnnnnnnnnnnnnnnnnnnnnnnnnnnnnnnnnnnnnnnnnnnnnnnnnnnnnnnnnnnnnnnnnnnnnnnnnnnnnnnnnnnnnnnnnnnnnnnnnnnnnnnnnnnnnnnnnnnnnnnnnnnnnnnnnnnnnnnnnnnnnnnnnnnnnnnnnnnnnnnnnnnnnnnnnnnnnnnnnnnnnnnnnnnnnnnnnnnnnnnnnnnnnnnnnnnnnnnnnnnnnnnnnnnnnnnnnnnnnnnnnnnnnnnnnnnnnnnnnnnnnnnnnnnnnnnnnnnnnnnnnnnnnnnnnnnnnnnnnnnnnnnnnnnnnnnnnnnnnnnnnnnnnnnnnnnnnnnnnnnnnnnnnnnnnnnnnnnnnnnnnnnnnnnnnnnnnnnnnnnnnnnnnnnnnnnnnnnnnnnnnnnnnnnnnnnnnnnnnnnnnnnnnnnnnnnnnnnnnnnnnnnnnnnnnnnnnnnnnnnnnnnnnnnnnnnnnnnnnnnnnnnnnnnnnnnnnnnnnnnnnnnnnnnnnnnnnnnnnnnnnnnnnnnnnnnnnnnnnnnnnnnnnnnnnnnnnnnnnnnnnnnnnnnnnnnnnnnnnnnnnnnnnnnnnnnnnnnnnnnnnnnnnnnnnnnnnnnnnnnnnnnnnnnnnnnnnnnnnnnnnnnnnnnnnnnnnnnnnnnnnnnnnnnnnnnnnnnnnnnnnnnnnnnnnnnnnnnnnnnnnnnnnnnnnnnnnnnnnnnnnnnnnnnnnnnnnnnnnnnnnnnnnnnnnnnnnnnnnnnnnnnnnnnnnnnnnnnnnnnnnnnnnnnnnnnnnnnnnnnnnnnnnnnnnnnnnnnnnnnnnnnnnnnnnnnnnnnnnnnnnnnnnnnnnnnnnnnnnnnnnnnnnnnnnnnnnnnnnnnnnnnnnnnnnnnnnnnnnnnnnnnnnnnnnnnnnnnnnnnnnnnnnnnnnnnnnnnnnnnnnnnnnnnnnnnnnnnnnnnnnnnnnnnnnnnnnnnnnnnnnnnnnnnnnnnnnnnnnnnnnnnnnnnnnnnnnnnnnnnnnnnnnnnnnnnnnnnnnnnnnnnnnnnnnnnnnnnnnnnnnnnnnnnnnnnnnnnnnnnnnnnnnnnnnnnnnnnnnnnnnnnnnnnnnnnnnnnnnnnnnnnnnnnnnnnnnnnnnnnnnnnnnnnnnnnnnnnnnnnnnnnnnnnnnnnnnnnnnnnnnnnnnnnnnnnnnnnnnnnnnnnnnnnnnnnnnnnnnnnnnnnnnnnnnnnnnnnnnnnnnnnnnnnnnnnnnnnnnnnnnnnnnnnnnnnnnnnnnnnnnnnnnnnnnnnnnnnnnnnnnnnnnnnnnnnnnnnnnnnnnnnnnnnnnnnnnnnnnnnnnnnnnnnnnnnnnnnnnnnnnnnnnnnnnnnnnnnnnnnnnnnnnnnnnnnnnnnnnnnnnnnnnnnnnnnnnnnnnnnnnnnnnnnnnnnnnnnnnnnnnnnnnnnnnnnnnnnnnnnnnnnnnnnnnnnnnnnnnnnnnnnnnnnnnnnnnnnnnnnnnnnnnnnnnnnnnnnnnnnnnnnnnnnnnnnnnnnnnnnnnnnnnnnnnnnnnnnnnnnnnnnnnnnnnnnnnnnnnnnnnnnnnnnnnnnnnnnnnnnnnnnnnnnnnnnnnnnnnnnnnnnnnnnnnnnnnnnnnnnnnnnnnnnnnnnnnnnnnnnnnnnnnnnnnnnnnnnnnnnnnnnnnnnnnnnnnnnnnnnnnnnnnnnnnnnnnnnnnnnnnnnnnnnnnnnnnnnnnnnnnnnnnnnnnnnnnnnnnnnnnnnnnnnnnnnnnnnnnnnnnnnnnnnnnnnnnnnnnnnnnnnnnnnnnnnnnnnnnnnnnnnnnnnnnnnnnnnnnnnnnnnnnnnnnnnnnnnnnnnnnnnnnnnnnnnnnnnnnnnnnnnnnnnnnnnnnnnnnnnnnnnnnnnnnnnnnnnnnnnnnnnnnnnnnnnnnnnnnnnnnnnnnnnnnnnnnnnnnnnnnnnnnnnnnnnnnnnnnnnnnnnnnnnnnnnnnnnnnnnnnnnnnnnnnnnnnnnnnnnnnnnnnnnnnnnnnnnnnnnnnnnnnnnnnnnnnnnnnnnnnnnnnnnnnnnnnnnnnnnnnnnnnnnnnnnnnnnnnnnnnnnnnnnnnnnnnnnnnnnnnnnnnnnnnnnnnnnnnnnnnnnnnnnnnnnnnnnnnnnnnnnnnnnnnnnnnnnnnnnnnnnnnnnnnnnnnnnnnnnnnnnnnnnnnnnnnnnnnnnnnnnnnnnnnnnnnnnnnnnnnnnnnnnnnnnnnnnnnnnnnnnnnnnnnnnnnnnnnnnnnnnnnnnnnnnnnnnnnnnnnnnnnnnnnnnnnnnnnnnnnnnnnnnnnnnnnnnnnnnnnnnnnnnnnnnnnnnnnnnnnnnnnnnnnnnnnnnnnnnnnnnnnnnnnnnnnnnnnnnnnnnnnnnnnnnnnnnnnnnnnnnnnnnnnnnnnnnnnnnnnnnnnnnnnnnnnnnnnnnnnnnnnnnnnnnnnnnnnnnnnnnnnnnnnnnnnnnnnnnnnnnnnnnnnnnnnnnnnnnnnnnnnnnnnnnnnnnnnnnnnnnnnnnnnnnnnnnnnnnnnnnnnnnnnnnnnnnnnnnnnnnnnnnnnnnnnnnnnnnnnnnnnnnnnnnnnnnnnnnnnnnnnnnnnnnnnnnnnnnnnnnnnnnnnnnnnnnnnnnnnnnnnnnnnnnnnnnnnnnnnnnnnnnnnnnnnnnnnnnnnnnnnnnnnnnnnnnnnnnnnnnnnnnnnnnnnnnnnnnnnnnnnnnnnnnnnnnnnnnnnnnnnnnnnnnnnnnnnnnnnnnnnnnnnnnnnnnnnnnnnnnnnnnnnnnnnnnnnnnnnnnnnnnnnnnnnnnnnnnnnnnnnnnnnnnnnnnnnnnnnnnnnnnnnnnnnnnnnnnnnnnnnnnnnnnnnnnnnnnnnnnnnnnnnnnnnnnnnnnnnnnnnnnnnnnnnnnnnnnnnnnnnnnnnnnnnnnnnnnnnnnnnnnnnnnnnnnnnnnnnnnnnnnnnnnnnnnnnnnnnnnnnnnnnnnnnnnnnnnnnnnnnnnnnnnnnnnnnnnnnnnnnnnnnnnnnnnnnnnnnnnnnnnnnnnnnnnnnnnnnnnnnnnnnnnnnnnnnnnnnnnnnnnnnnnnnnnnnnnnnnnnnnnnnnnnnnnnnnnnnnnnnnnnnnnnnnnnnnnnnnnnnnnnnnnnnnnnnnnnnnnnnnnnnnnnnnnnnnnnnnnnnnnnnnnnnnnnnnnnnnnnnnnnnnnnnnnnnnnnnnnnnnnnnnnnnnnnnnnnnnnnnnnnnnnnnnnnnnnnnnnnnnnnnnnnnnnnnnnnnnnnnnnnnnnnnnnnnnnnnnnnnnnnnnnnnnnnnnnnnnnnnnnnnnnnnnnnnnnnnnnnnnnnnnnnnnnnnnnnnnnnnnnnnnnnnnnnnnnnnnnnnnnnnnnnnnnnnnnnnnnnnnnnnnnnnnnnnnnnnnnnnnnnnnnnnnnnnnnnnnnnnnnnnnnnnnnnnnnnnnnnnnnnnnnnnnnnnnnnnnnnnnnnnnnnnnnnnnnnnnnnnnnnnnnnnnnnnnnnnnnnnnnnnnnnnnnnnnnnnnnnnnnnnnnnnnnnnnnnnnnnnnnnnnnnnnnnnnnnnnnnnnnnnnnnnnnnnnnnnnnnnnnnnnnnnnnnnnnnnnnnnnnnnnnnnnnnnnnnnnnnnnnnnnnnnnnnnnnnnnnnnnnnnnnnnnnnnnnnnnnnnnnnnnnnnnnnnnnnnnnnnnnnnnnnnnnnnnnnnnnnnnnnnnnnnnnnnnnnnnnnnnnnnnnnnnnnnnnnnnnnnnnnnnnnnnnnnnnnnnnnnnnnnnnnnnnnnnnnnnnnnnnnnnnnnnnnnnnnnnnnnnnnnnnnnnnnnnnnnnnnnnnnnnnnnnnnnnnnnnnnnnnnnnnnnnnnnnnnnnnnnnnnnnnnnnnnnnnnnnnnnnnnnnnnnnnnnnnnnnnnnnnnnnnnnnnnnnnnnnnnnnnnnnnnnnnnnnnnnnnnnnnnnnnnnnnnnnnnnnnnnnnnnnnnnnnnnnnnnnnnnnnnnnnnnnnnnnnnnnnnnnnnnnnnnnnnnnnnnnnnnnnnnnnnnnnnnnnnnnnnnnnnnnnnnnnnnnnnnnnnnnnnnnnnnnnnnnnnnnnnnnnnnnnnnnnnnnnnnnnnnnnnnnnnnnnnnnnnnnnnnnnnnnnnnnnnnnnnnnnnnnnnnnnnnnnnnnnnnnnnnnnnnnnnnnnnnnnnnnnnnnnnnnnnnnnnnnnnnnnnnnnnnnnnnnnnnnnnnnnnnnnnnnnnnnnnnnnnnnnnnnnnnnnnnnnnnnnnnnnnnnnnnnnnnnnnnnnnnnnnnnnnnnnnnnnnnnnnnnnnnnnnnnnnnnnnnnnnnnnnnnnnnnnnnnnnnnnnnnnnnnnnnnnnnnnnnnnnnnnnnnnnnnnnnnnnnnnnnnnnnnnnnnnnnnnnnnnnnnnnnnnnnnnnnnnnnnnnnnnnnnnnnnnnnnnnnnnnnnnnnnnnnnnnnnnnnnnnnnnnnnnnnnnnnnnnnnnnnnnnnnnnnnnnnnnnnnnnnnnnnnnnnnnnnnnnnnnnnnnnnnnnnnnnnnnnnnnnnnnnnnnnnnnnnnnnnnnnnnnnnnnnnnnnnnnnnnnnnnnnnnnnnnnnnnnnnnnnnnnnnnnnnnnnnnnnnnnnnnnnnnnnnnnnnnnnnnnnnnnnnnnnnnnnnnnnnnnnnnnnnnnnnnnnnnnnnnnnnnnnnnnnnnnnnnnnnnnnnnnnnnnnnnnnnnnnnnnnnnnnnnnnnnnnnnnnnnnnnnnnnnnnnnnnnnnnnnnnnnnnnnnnnnnnnnnnnnnnnnnnnnnnnnnnnnnnnnnnnnnnnnnnnnnnnnnnnnnnnnnnnnnnnnnnnnnnnnnnnnnnnnnnnnnnnnnnnnnnnnnnnnnnnnnnnnnnnnnnnnnnnnnnnnnnnnnnnnnnnnnnnnnnnnnnnnnnnnnnnnnnnnnnnnnnnnnnnnnnnnnnnnnnnnnnnnnnnnnnnnnnnnnnnnnnnnnnnnnnnnnnnnnnnnnnnnnnnnnnnnnnnnnnnnnnnnnnnnnnnnnnnnnnnnnnnnnnnnnnnnnnnnnnnnnnnnnnnnnnnnnnnnnnnnnnnnnnnnnnnnnnnnnnnnnnnnnnnnnnnnnnnnnnnnnnnnnnnnnnnnnnnnnnnnnnnnnnnnnnnnnnnnnnnnnnnnnnnnnnnnnnnnnnnnnnnnnnnnnnnnnnnnnnnnnnnnnnnnnnnnnnnnnnnnnnnnnnnnnnnnnnnnnnnnnnnnnnnnnnnnnnnnnnnnnnnnnnnnnnnnnnnnnnnnnnnnnnnnnnnnnnnnnnnnnnnnnnnnnnnnnnnnnnnnnnnnnnnnnnnnnnnnnnnnnnnnnnnnnnnnnnnnnnnnnnnnnnnnnnnnnnnnnnnnnnnnnnnnnnnnnnnnnnnnnnnnnnnnnnnnnnnnnnnnnnnnnnnnnnnnnnnnnnnnnnnnnnnnnnnnnnnnnnnnnnnnnnnnnnnnnnnnnnnnnnnnnnnnnnnnnnnnnnnnnnnnnnnnnnnnnnnnnnnnnnnnnnnnnnnnnnnnnnnnnnnnnnnnnnnnnnnnnnnnnnnnnnnnnnnnnnnnnnnnnnnnnnnnnnnnnnnnnnnnnnnnnnnnnnnnnnnnnnnnnnnnnnnnnnnnnnnnnnnnnnnnnnnnnnnnnnnnnnnnnnnnnnnnnnnnnnnnnnnnnnnnnnnnnnnnnnnnnnnnnnnnnnnnnnnnnnnnnnnnnnnnnnnnnnnnnnnnnnnnnnnnnnnnnnnnnnnnnnnnnnnnnnnnnnnnnnnnnnnnnnnnnnnnnnnnnnnnnnnnnnnnnnnnnnnnnnnnnnnnnnnnnnnnnnnnnnnnnnnnnnnnnnnnnnnnnnnnnnnnnnnnnnnnnnnnnnnnnnnnnnnnnnnnnnnnnnnnnnnnnnnnnnnnnnnnnnnnnnnnnnnnnnnnnnnnnnnnnnnnnnnnnnnnnnnnnnnnnnnnnnnnnnnnnnnnnnnnnnnnnnnnnnnnnnnnnnnnnnnnnnnnnnnnnnnnnnnnnnnnnnnnnnnnnnnnnnnnnnnnnnnnnnnnnnnnnnnnnnnnnnnnnnnnnnnnnnnnnnnnnnnnnnnnnnnnnnnnnnnnnnnnnnnnnnnnnnnnnnnnnnnnnnnnnnnnnnnnnnnnnnnnnnnnnnnnnnnnnnnnnnnnnnnnnnnnnnnnnnnnnnnnnnnnnnnnnnnnnnnnnnnnnnnnnnnnnnnnnnnnnnnnnnnnnnnnnnnnnnnnnnnnnnnnnnnnnnnnnnnnnnnnnnnnnnnnnnnnnnnnnnnnnnnnnnnnnnnnnnnnnnnnnnnnnnnnnnnnnnnnnnnnnnnnnnnnnnnnnnnnnnnnnnnnnnnnnnnnnnnnnnnnnnnnnnnnnnnnnnnnnnnnnnnnnnnnnnnnnnnnnnnnnnnnnnnnnnnnnnnnnnnnnnnnnnnnnnnnnnnnnnnnnnnnnnnnnnnnnnnnnnnnnnnnnnnnnnnnnnnnnnnnnnnnnnnnnnnnnnnnnnnnnnnnnnnnnnnnnnnnnnnnnnnnnnnnnnnnnnnnnnnnnnnnnnnnnnnnnnnnnnnnnnnnnnnnnnnnnnnnnnnnnnnnnnnnnnnnnnnnnnnnnnnnnnnnnnnnnnnnnnnnnnnnnnnnnnnnnnnnnnnnnnnnnnnnnnnnnnnnnnnnnnnnnnnnnnnnnnnnnnnnnnnnnnnnnnnnnnnnnnnnnnnnnnnnnnnnnnnnnnnnnnnnnnnnnnnnnnnnnnnnnnnnnnnnnnnnnnnnnnnnnnnnnnnnnnnnnnnnnnnnnnnnnnnnnnnnnnnnnnnnnnnnnnnnnnnnnnnnnnnnnnnnnnnnnnnnnnnnnnnnnnnnnnnnnnnnnnnnnnnnnnnnnnnnnnnnnnnnnnnnnnnnnnnnnnnnnnnnnnnnnnnnnnnnnnnnnnnnnnnnnnnnnnnnnnnnnnnnnnnnnnnnnnnnnnnnnnnnnnnnnnnnnnnnnnnnnnnnnnnnnnnnnnnnnnnnnnnnnnnnnnnnnnnnnnnnnnnnnnnnnnnnnnnnnnnnnnnnnnnnnnnnnnnnnnnnnnnnnnnnnnnnnnnnnnnnnnnnnnnnnnnnnnnnnnnnnnnnnnnnnnnnnnnnnnnnnnnnnnnnnnnnnnnnnnnnnnnnnnnnnnnnnnnnnnnnnnnnnnnnnnnnnnnnnnnnnnnnnnnnnnnnnnnnnnnnnnnnnnnnnnnnnnnnnnnnnnnnnnnnnnnnnnnnnnnnnnnnnnnnnnnnnnnnnnnnnnnnnnnnnnnnnnnnnnnnnnnnnnnnnnnnnnnnnnnnnnnnnnnnnnnnnnnnnnnnnnnnnnnnnnnnnnnnnnnnnnnnnnnnnnnnnnnnnnnnnnnnnnnnnnnnnnnnnnnnnnnnnnnnnnnnnnnnnnnnnnnnnnnnnnnnnnnnnnnnnnnnnnnnnnnnnnnnnnnnnnnnnnnnnnnnnnnnnnnnnnnnnnnnnnnnnnnnnnnnnnnnnnnnnnnnnnnnnnnnnnnnnnnnnnnnnnnnnnnnnnnnnnnnnnnnnnnnnnnnnnnnnnnnnnnnnnnnnnnnnnnnnnnnnnnnnnnnnnnnnnnnnnnnnnnnnnnnnnnnnnnnnnnnnnnnnnnnnnnnnnnnnnnnnnnnnnnnnnnnnnnnnnnnnnnnnnnnnnnnnnnnnnnnnnnnnnnnnnnnnnnnnnnnnnnnnnnnnnnnnnnnnnnnnnnnnnnnnnnnnnnnnnnnnnnnnnnnnnnnnnnnnnnnnnnnnnnnnnnnnnnnnnnnnnnnnnnnnnnnnnnnnnnnnnnnnnnnnnnnnnnnnnnnnnnnnnnnnnnnnnnnnnnnnnnnnnnnnnnnnnnnnnnnnnnnnnnnnnnnnnnnnnnnnnnnnnnnnnnnnnnnnnnnnnnnnnnnnnnnnnnnnnnnnnnnnnnnnnnnnnnnnnnnnnnnnnnnnnnnnnnnnnnnnnnnnnnnnnnnnnnnnnnnnnnnnnnnnnnnnnnnnnnnnnnnnnnnnnnnnnnnnnnnnnnnnnnnnnnnnnnnnnnnnnnnnnnnnnnnnnnnnnnnnnnnnnnnnnnnnnnnnnnnnnnnnnnnnnnnnnnnnnnnnnnnnnnnnnnnnnnnnnnnnnnnnnnnnnnnnnnnnnnnnnnnnnnnnnnnnnnnnnnnnnnnnnnnnnnnnnnnnnnnnnnnnnnnnnnnnnnnnnnnnnnnnnnnnnnnnnnnnnnnnnnnnnnnnnnnnnnnnnnnnnnnnnnnnnnnnnnnnnnnnnnnnnnnnnnnnnnnnnnnnnnnnnnnnnnnnnnnnnnnnnnnnnnnnnnnnnnnnnnnnnnnnnnnnnnnnnnnnnnnnnnnnnnnnnnnnnnnnnnnnnnnnnnnnnnnnnnnnnnnnnnnnnnnnnnnnnnnnnnnnnnnnnnnnnnnnnnnnnnnnnnnnnnnnnnnnnnnnnnnnnnnnnnnnnnnnnnnnnnnnnnnnnnnnnnnnnnnnnnnnnnnnnnnnnnnnnnnnnnnnnnnnnnnnnnnnnnnnnnnnnnnnnnnnnnnnnnnnnnnnnnnnnnnnnnnnnnnnnnnnnnnnnnnnnnnnnnnnnnnnnnnnnnnnnnnnnnnnnnnnnnnnnnnnnnnnnnnnnnnnnnnnnnnnnnnnnnnnnnnnnnnnnnnnnnnnnnnnnnnnnnnnnnnnnnnnnnnnnnnnnnnnnnnnnnnnnnnnnnnnnnnnnnnnnnnnnnnnnnnnnnnnnnnnnnnnnnnnnnnnnnnnnnnnnnnnnnnnnnnnnnnnnnnnnnnnnnnnnnnnnnnnnnnnnnnnnnnnnnnnnnnnnnnnnnnnnnnnnnnnnnnnnnnnnnnnnnnnnnnnnnnnnnnnnnnnnnnnnnnnnnnnnnnnnnnnnnnnnnnnnnnnnnnnnnnnnnnnnnnnnnnnnnnnnnnnnnnnnnnnnnnnnnnnnnnnnnnnnnnnnnnnnnnnnnnnnnnnnnnnnnnnnnnnnnnnnnnnnnnnnnnnnnnnnnnnnnnnnnnnnnnnnnnnnnnnnnnnnnnnnnnnnnnnnnnnnnnnnnnnnnnnnnnnnnnnnnnnnnnnnnnnnnnnnnnnnnnnnnnnnnnnnnnnnnnnnnnnnnnnnnnnnnnnnnnnnnnnnnnnnnnnnnnnnnnnnnnnnnnnnnnnnnnnnnnnnnnnnnnnnnnnnnnnnnnnnnnnnnnnnnnnnnnnnnnnnnnnnnnnnnnnnnnnnnnnnnnnnnnnnnnnnnnnnnnnnnnnnnnnnnnnnnnnnnnnnnnnnnnnnnnnnnnnnnnnnnnnnnnnnnnnnnnnnnnnnnnnnnnnnnnnnnnnnnnnnnnnnnnnnnnnnnnnnnnnnnnnnnnnnnnnnnnnnnnnnnnnnnnnnnnnnnnnnnnnnnnnnnnnnnnnnnnnnnnnnnnnnnnnnnnnnnnnnnnnnnnnnnnnnnnnnnnnnnnnnnnnnnnnnnnnnnnnnnnnnnnnnnnnnnnnnnnnnnnnnnnnnnnnnnnnnnnnnnnnnnnnnnnnnnnnnnnnnnnnnnnnnnnnnnnnnnnnnnnnnnnnnnnnnnnnnnnnnnnnnnnnnnnnnnnnnnnnnnnnnnnnnnnnnnnnnnnnnnnnnnnnnnnnnnnnnnnnnnnnnnnnnnnnnnnnnnnnnnnnnnnnnnnnnnnnnnnnnnnnnnnnnnnnnnnnnnnnnnnnnnnnnnnnnnnnnnnnnnnnnnnnnnnnnnnnnnnnnnnnnnnnnnnnnnnnnnnnnnnnnnnnnnnnnnnnnnnnnnnnnnnnnnnnnnnnnnnnnnnnnnnnnnnnnnnnnnnnnnnnnnnnnnnnnnnnnnnnnnnnnnnnnnnnnnnnnnnnnnnnnnnnnnnnnnnnnnnnnnnnnnnnnnnnnnnnnnnnnnnnnnnnnnnnnnnnnnnnnnnnnnnnnnnnnnnnnnnnnnnnnnnnnnnnnnnnnnnnnnnnnnnnnnnnnnnnnnnnnnnnnnnnnnnnnnnnnnnnnnnnnnnnnnnnnnnnnnnnnnnnnnnnnnnnnnnnnnnnnnnnnnnnnnnnnnnnnnnnnnnnnnnnnnnnnnnnnnnnnnnnnnnnnnnnnnnnnnnnnnnnnnnnnnnnnnnnnnnnnnnnnnnnnnnnnnnnnnnnnnnnnnnnnnnnnnnnnnnnnnnnnnnnnnnnnnnnnnnnnnnnnnnnnnnnnnnnnnnnnnnnnnnnnnnnnnnnnnnnnnnnnnnnnnnnnnnnnnnnnnnnnnnnnnnnnnnnnnnnnnnnnnnnnnnnnnnnnnnnnnnnnnnnnnnnnnnnnnnnnnnnnnnnnnnnnnnnnnnnnnnnnnnnnnnnnnnnnnnnnnnnnnnnnnnnnnnnnnnnnnnnnnnnnnnnnnnnnnnnnnnnnnnnnnnnnnnnnnnnnnnnnnnnnnnnnnnnnnnnnnnnnnnnnnnnnnnnnnnnnnnnnnnnnnnnnnnnnnnnnnnnnnnnnnnnnnnnnnnnnnnnnnnnnnnnnnnnnnnnnnnnnnnnnnnnnnnnnnnnnnnnnnnnnnnnnnnnnnnnnnnnnnnnnnnnnnnnnnnnnnnnnnnnnnnnnnnnnnnnnnnnnnnnnnnnnnnnnnnnnnnnnnnnnnnnnnnnnnnnnnnnnnnnnnnnnnnnnnnnnnnnnnnnnnnnnnnnnnnnnnnnnnnnnnnnnnnnnnnnnnnnnnnnnnnnnnnnnnnnnnnnnnnnnnnnnnnnnnnnnnnnnnnnnnnnnnnnnnnnnnnnnnnnnnnnnnnnnnnnnnnnnnnnnnnnnnnnnnnnnnnnnnnnnnnnnnnnnnnnnnnnnnnnnnnnnnnnnnnnnnnnnnnnnnnnnnnnnnnnnnnnnnnnnnnnnnnnnnnnnnnnnnnnnnnnnnnnnnnnnnnnnnnnnnnnnnnnnnnnnnnnnnnnnnnnnnnnnnnnnnnnnnnnnnnnnnnnnnnnnnnnnnnnnnnnnnnnnnnnnnnnnnnnnnnnnnnnnnnnnnnnnnnnnnnnnnnnnnnnnnnnnnnnnnnnnnnnnnnnnnnnnnnnnnnnnnnnnnnnnnnnnnnnnnnnnnnnnnnnnnnnnnnnnnnnnnnnnnnnnnnnnnnnnnnnnnnnnnnnnnnnnnnnnnnnnnnnnnnnnnnnnnnnnnnnnnnnnnnnnnnnnnnnnnnnnnnnnnnnnnnnnnnnnnnnnnnnnnnnnnnnnnnnnnnnnnnnnnnnnnnnnnnnnnnnnnnnnnnnnnnnnnnnnnnnnnnnnnnnnnnnnnnnnnnnnnnnnnnnnnnnnnnnnnnnnnnnnnnnnnnnnnnnnnnnnnnnnnnnnnnnnnnnnnnnnnnnnnnnnnnnnnnnnnnnnnnnnnnnnnnnnnnnnnnnnnnnnnnnnnnnnnnnnnnnnnnnnnnnnnnnnnnnnnnnnnnnnnnnnnnnnnnnnnnnnnnnnnnnnnnnnnnnnnnnnnnnnnnnnnnnnnnnnnnnnnnnnnnnnnnnnnnnnnnnnnnnnnnnnnnnnnnnnnnnnnnnnnnnnnnnnnnnnnnnnnnnnnnnnnnnnnnnnnnnnnnnnnnnnnnnnnnnnnnnnnnnnnnnnnnnnnnnnnnnnnnnnnnnnnnnnnnnnnnnnnnnnnnnnnnnnnnnnnnnnnnnnnnnnnnnnnnnnnnnnnnnnnnnnnnnnnnnnnnnnnnnnnnnnnnnnnnnnnnnnnnnnnnnnnnnnnnnnnnnnnnnnnnnnnnnnnnnnnnnnnnnnnnnnnnnnnnnnnnnnnnnnnnnnnnnnnnnnnnnnnnnnnnnnnnnnnnnnnnnnnnnnnnnnnnnnnnnnnnnnnnnnnnnnnnnnnnnnnnnnnnnnnnnnnnnnnnnnnnnnnnnnnnnnnnnnnnnnnnnnnnnnnnnnnnnnnnnnnnnnnnnnnnnnnnnnnnnnnnnnnnnnnnnnnnnnnnnnnnnnnnnnnnnnnnnnnnnnnnnnnnnnnnnnnnnnnnnnnnnnnnnnnnnnnnnnnnnnnnnnnnnnnnnnnnnnnnnnnnnnnnnnnnnnnnnnnnnnnnnnnnnnnnnnnnnnnnnnnnnnnnnnnnnnnnnnnnnnnnnnnnnnnnnnnnnnnnnnnnnnnnnnnnnnnnnnnnnnnnnnnnnnnnnnnnnnnnnnnnnnnnnnnnnnnnnnnnnnnnnnnnnnnnnnnnnnnnnnnnnnnnnnnnnnnnnnnnnnnnnnnnnnnnnnnnnnnnnnnnnnnnnnnnnnnnnnnnnnnnnnnnnnnnnnnnnnnnnnnnnnnnnnnnnnnnnnnnnnnnnnnnnnnnnnnnnnnnnnnnnnnnnnnnnnnnnnnnnnnnnnnnnnnnnnnnnnnnnnnnnnnnnnnnnnnnnnnnnnnnnnnnnnnnnnnnnnnnnnnnnnnnnnnnnnnnnnnnnnnnnnnnnnnnnnnnnnnnnnnnnnnnnnnnnnnnnnnnnnnnnnnnnnnnnnnnnnnnnnnnnnnnnnnnnnnnnnnnnnnnnnnnnnnnnnnnnnnnnnnnnnnnnnnnnnnnnnnnnnnnnnnnnnnnnnnnnnnnnnnnnnnnnnnnnnnnnnnnnnnnnnnnnnnnnnnnnnnnnnnnnnnnnnnnnnnnnnnnnnnnnnnnnnnnnnnnnnnnnnnnnnnnnnnnnnnnnnnnnnnnnnnnnnnnnnnnnnnnnnnnnnnnnnnnnnnnnnnnnnnnnnnnnnnnnnnnnnnnnnnnnnnnnnnnnnnnnnnnnnnnnnnnnnnnnnnnnnnnnnnnnnnnnnnnnnnnnnnnnnnnnnnnnnnnnnnnnnnnnnnnnnnnnnnnnnnnnnnnnnnnnnnnnnnnnnnnnnnnnnnnnnnnnnnnnnnnnnnnnnnnnnnnnnnnnnnnnnnnnnnnnnnnnnnnnnnnnnnnnnnnnnnnnnnnnnnnnnnnnnnnnnnnnnnnnnnnnnnnnnnnnnnnnnnnnnnnnnnnnnnnnnnnnnnnnnnnnnnnnnnnnnnnnnnnnnnnnnnnnnnnnnnnnnnnnnnnnnnnnnnnnnnnnnnnnnnnnnnnnnnnnnnnnnnnnnnnnnnnnnnnnnnnnnnnnnnnnnnnnnnnnnnnnnnnnnnnnnnnnnnnnnnnnnnnnnnnnnnnnnnnnnnnnnnnnnnnnnnnnnnnnnnnnnnnnnnnnnnnnnnnnnnnnnnnnnnnnnnnnnnnnnnnnnnnnnnnnnnnnnnnnnnnnnnnnnnnnnnnnnnnnnnnnnnnnnnnnnnnnnnnnnnnnnnnnnnnnnnnnnnnnnnnnnnnnnnnnnnnnnnnnnnnnnnnnnnnnnnnnnnnnnnnnnnnnnnnnnnnnnnnnnnnnnnnnnnnnnnnnnnnnnnnnnnnnnnnnnnnnnnnnnnnnnnnnnnnnnnnnnnnnnnnnnnnnnnnnnnnnnnnnnnnnnnnnnnnnnnnnnnnnnnnnnnnnnnnnnnnnnnnnnnnnnnnnnnnnnnnnnnnnnnnnnnnnnnnnnnnnnnnnnnnnnnnnnnnnnnnnnnnnnnnnnnnnnnnnnnnnnnnnnnnnnnnnnnnnnnnnnnnnnnnnnnnnnnnnnnnnnnnnnnnnnnnnnnnnnnnnnnnnnnnnnnnnnnnnnnnnnnnnnnnnnnnnnnnnnnnnnnnnnnnnnnnnnnnnnnnnnnnnnnnnnnnnnnnnnnnnnnnnnnnnnnnnnnnnnnnnnnnnnnnnnnnnnnnnnnnnnnnnnnnnnnnnnnnnnnnnnnnnnnnnnnnnnnnnnnnnnnnnnnnnnnnnnnnnnnnnnnnnnnnnnnnnnnnnnnnnnnnnnnnnnnnnnnnnnnnnnnnnnnnnnnnnnnnnnnnnnnnnnnnnnnnnnnnnnnnnnnnnnnnnnnnnnnnnnnnnnnnnnnnnnnnnnnnnnnnnnnnnnnnnnnnnnnnnnnnnnnnnnnnnnnnnnnnnnnnnnnnnnnnnnnnnnnnnnnnnnnnnnnnnnnnnnnnnnnnnnnnnnnnnnnnnnnnnnnnnnnnnnnnnnnnnnnnnnnnnnnnnnnnnnnnnnnnnnnnnnnnnnnnnnnnnnnnnnnnnnnnnnnnnnnnnnnnnnnnnnnnnnnnnnnnnnnnnnnnnnnnnnnnnnnnnnnnnnnnnnnnnnnnnnnnnnnnnnnnnnnnnnnnnnnnnnnnnnnnnnnnnnnnnnnnnnnnnnnnnnnnnnnnnnnnnnnnnnnnnnnnnnnnnnnnnnnnnnnnnnnnnnnnnnnnnnnnnnnnnnnnnnnnnnnnnnnnnnnnnnnnnnnnnnnnnnnnnnnnnnnnnnnnnnnnnnnnnnnnnnnnnnnnnnnnnnnnnnnnnnnnnnnnnnnnnnnnnnnnnnnnnnnnnnnnnnnnnnnnnnnnnnnnnnnnnnnnnnnnnnnnnnnnnnnnnnnnnnnnnnnnnnnnnnnnnnnnnnnnnnnnnnnnnnnnnnnnnnnnnnnnnnnnnnnnnnnnnnnnnnnnnnnnnnnnnnnnnnnnnnnnnnnnnnnnnnnnnnnnnnnnnnnnnnnnnnnnnnnnnnnnnnnnnnnnnnnnnnnnnnnnnnnnnnnnnnnnnnnnnnnnnnnnnnnnnnnnnnnnnnnnnnnnnnnnnnnnnnnnnnnnnnnnnnnnnnnnnnnnnnnnnnnnnnnnnnnnnnnnnnnnnnnnnnnnnnnnnnnnnnnnnnnnnnnnnnnnnnnnnnnnnnnnnnnnnnnnnnnnnnnnnnnnnnnnnnnnnnnnnnnnnnnnnnnnnnnnnnnnnnnnnnnnnnnnnnnnnnnnnnnnnnnnnnnnnnnnnnnnnnnnnnnnnnnnnnnnnnnnnnnnnnnnnnnnnnnnnnnnnnnnnnnnnnnnnnnnnnnnnnnnnnnnnnnnnnnnnnnnnnnnnnnnnnnnnnnnnnnnnnnnnnnnnnnnnnnnnnnnnnnnnnnnnnnnnnnnnnnnnnnnnnnnnnnnnnnnnnnnnnnnnnnnnnnnnnnnnnnnnnnnnnnnnnnnnnnnnnnnnnnnnnnnnnnnnnnnnnnnnnnnnnnnnnnnnnnnnnnnnnnnnnnnnnnnnnnnnnnnnnnnnnnnnnnnnnnnnnnnnnnnnnnnnnnnnnnnnnnnnnnnnnnnnnnnnnnnnnnnnnnnnnnnnnnnnnnnnnnnnnnnnnnnnnnnnnnnnnnnnnnnnnnnnnnnnnnnnnnnnnnnnnnnnnnnnnnnnnnnnnnnnnnnnnnnnnnnnnnnnnnnnnnnnnnnnnnnnnnnnnnnnnnnnnnnnnnnnnnnnnnnnnnnnnnnnnnnnnnnnnnnnnnnnnnnnnnnnnnnnnnnnnnnnnnnnnnnnnnnnnnnnnnnnnnnnnnnnnnnnnnnnnnnnnnnnnnnnnnnnnnnnnnnnnnnnnnnnnnnnnnnnnnnnnnnnnnnnnnnnnnnnnnnnnnnnnnnnnnnnnnnnnnnnnnnnnnnnnnnnnnnnnnnnnnnnnnnnnnnnnnnnnnnnnnnnnnnnnnnnnnnnnnnnnnnnnnnnnnnnnnnnnnnnnnnnnnnnnnnnnnnnnnnnnnnnnnnnnnnnnnnnnnnnnnnnnnnnnnnnnnnnnnnnnnnnnnnnnnnnnnnnnnnnnnnnnnnnnnnnnnnnnnnnnnnnnnnnnnnnnnnnnnnnnnnnnnnnnnnnnnnnnnnnnnnnnnnnnnnnnnnnnnnnnnnnnnnnnnnnnnnnnnnnnnnnnnnnnnnnnnnnnnnnnnnnnnnnnnnnnnnnnnnnnnnnnnnnnnnnnnnnnnnnnnnnnnnnnnnnnnnnnnnnnnnnnnnnnnnnnnnnnnnnnnnnnnnnnnnnnnnnnnnnnnnnnnnnnnnnnnnnnnnnnnnnnnnnnnnnnnnnnnnnnnnnnnnnnnnnnnnnnnnnnnnnnnnnnnnnnnnnnnnnnnnnnnnnnnnnnnnnnnnnnnnnnnnnnnnnnnnnnnnnnnnnnnnnnnnnnnnnnnnnnnnnnnnnnnnnnnnnnnnnnnnnnnnnnnnnnnnnnnnnnnnnnnnnnnnnnnnnnnnnnnnnnnnnnnnnnnnnnnnnnnnnnnnnnnnnnnnnnnnnnnnnnnnnnnnnnnnnnnnnnnnnnnnnnnnnnnnnnnnnnnnnnnnnnnnnnnnnnnnnnnnnnnnnnnnnnnnnnnnnnnnnnnnnnnnnnnnnnnnnnnnnnnnnnnnnnnnnnnnnnnnnnnnnnnnnnnnnnnnnnnnnnnnnnnnnnnnnnnnnnnnnnnnnnnnnnnnnnnnnnnnnnnnnnnnnnnnnnnnnnnnnnnnnnnnnnnnnnnnnnnnnnnnnnnnnnnnnnnnnnnnnnnnnnnnnnnnnnnnnnnnnnnnnnnnnnnnnnnnnnnnnnnnnnnnnnnnnnnnnnnnnnnnnnnnnnnnnnnnnnnnnnnnnnnnnnnnnnnnnnnnnnnnnnnnnnnnnnnnnnnnnnnnnnnnnnnnnnnnnnnnnnnnnnnnnnnnnnnnnnnnnnnnnnnnnnnnnnnnnnnnnnnnnnnnnnnnnnnnnnnnnnnnnnnnnnnnnnnnnnnnnnnnnnnnnnnnnnnnnnnnnnnnnnnnnnnnnnnnnnnnnnnnnnnnnnnnnnnnnnnnnnnnnnnnnnnnnnnnnnnnnnnnnnnnnnnnnnnnnnnnnnnnnnnnnnnnnnnnnnnnnnnnnnnnnnnnnnnnnnnnnnnnnnnnnnnnnnnnnnnnnnnnnnnnnnnnnnnnnnnnnnnnnnnnnnnnnnnnnnnnnnnnnnnnnnnnnnnnnnnnnnnnnnnnnnnnnnnnnnnnnnnnnnnnnnnnnnnnnnnnnnnnnnnnnnnnnnnnnnnnnnnnnnnnnnnnnnnnnnnnnnnnnnnnnnnnnnnnnnnnnnnnnnnnnnnnnnnnnnnnnnnnnnnnnnnnnnnnnnnnnnnnnnnnnnnnnnnnnnnnnnnnnnnnnnnnnnnnnnnnnnnnnnnnnnnnnnnnnnnnnnnnnnnnnnnnnnnnnnnnnnnnnnnnnnnnnnnnnnnnnnnnnnnnnnnnnnnnnnnnnnnnnnnnnnnnnnnnnnnnnnnnnnnnnnnnnnnnnnnnnnnnnnnnnnnnnnnnnnnnnnnnnnnnnnnnnnnnnnnnnnnnnnnnnnnnnnnnnnnnnnnnnnnnnnnnnnnnnnnnnnnnnnnnnnnnnnnnnnnnnnnnnnnnnnnnnnnnnnnnnnnnnnnnnnnnnnnnnnnnnnnnnnnnnnnnnnnnnnnnnnnnnnnnnnnnnnnnnnnnnnnnnnnnnnnnnnnnnnnnnnnnnnnnnnnnnnnnnnnnnnnnnnnnnnnnnnnnnnnnnnnnnnnnnnnnnnnnnnnnnnnnnnnnnnnnnnnnnnnnnnnnnnnnnnnnnnnnnnnnnnnnnnnnnnnnnnnnnnnnnnnnnnnnnnnnnnnnnnnnnnnnnnnnnnnnnnnnnnnnnnnnnnnnnnnnnnnnnnnnnnnnnnnnnnnnnnnnnnnnnnnnnnnnnnnnnnnnnnnnnnnnnnnnnnnnnnnnnnnnnnnnnnnnnnnnnnnnnnnnnnnnnnnnnnnnnnnnnnnnnnnnnnnnnnnnnnnnnnnnnnnnnnnnnnnnnnnnnnnnnnnnnnnnnnnnnnnnnnnnnnnnnnnnnnnnnnnnnnnnnnnnnnnnnnnnnnnnnnnnnnnnnnnnnnnnnnnnnnnnnnnnnnnnnnnnnnnnnnnnnnnnnnnnnnnnnnnnnnnnnnnnnnnnnnnnnnnnnnnnnnnnnnnnnnnnnnnnnnnnnnnnnnnnnnnnnnnnnnnnnnnnnnnnnnnnnnnnnnnnnnnnnnnnnnnnnnnnnnnnnnnnnnnnnnnnnnnnnnnnnnnnnnnnnnnnnnnnnnnnnnnnnnnnnnnnnnnnnnnnnnnnnnnnnnnnnnnnnnnnnnnnnnnnnnnnnnnnnnnnnnnnnnnnnnnnnnnnnnnnnnnnnnnnnnnnnnnnnnnnnnnnnnnnnnnnnnnnnnnnnnnnnnnnnnnnnnnnnnnnnnnnnnnnnnnnnnnnnnnnnnnnnnnnnnnnnnnnnnnnnnnnnnnnnnnnnnnnnnnnnnnnnnnnnnnnnnnnnnnnnnnnnnnnnnnnnnnnnnnnnnnnnnnnnnnnnnnnnnnnnnnnnnnnnnnnnnnnnnnnnnnnnnnnnnnnnnnnnnnnnnnnnnnnnnnnnnnnnnnnnnnnnnnnnnnnnnnnnnnnnnnnnnnnnnnnnnnnnnnnnnnnnnnnnnnnnnnnnnnnnnnnnnnnnnnnnnnnnnnnnnnnnnnnnnnnnnnnnnnnnnnnnnnnnnnnnnnnnnnnnnnnnnnnnnnnnnnnnnnnnnnnnnnnnnnnnnnnnnnnnnnnnnnnnnnnnnnnnnnnnnnnnnnnnnnnnnnnnnnnnnnnnnnnnnnnnnnnnnnnnnnnnnnnnnnnnnnnnnnnnnnnnnnnnnnnnnnnnnnnnnnnnnnnnnnnnnnnnnnnnnnnnnnnnnnnnnnnnnnnnnnnnnnnnnnnnnnnnnnnnnnnnnnnnnnnnnnnnnnnnnnnnnnnnnnnnnnnnnnnnnnnnnnnnnnnnnnnnnnnnnnnnnnnnnnnnnnnnnnnnnnnnnnnnnnnnnnnnnnnnnnnnnnnnnnnnnnnnnnnnnnnnnnnnnnnnnnnnnnnnnnnnnnnnnnnnnnnnnnnnnnnnnnnnnnnnnnnnnnnnnnnnnnnnnnnnnnnnnnnnnnnnnnnnnnnnnnnnnnnnnnnnnnnnnnnnnnnnnnnnnnnnnnnnnnnnnnnnnnnnnnnnnnnnnnnnnnnnnnnnnnnnnnnnnnnnnnnnnnnnnnnnnnnnnnnnnnnnnnnnnnnnnnnnnnnnnnnnnnnnnnnnnnnnnnnnnnnnnnnnnnnnnnnnnnnnnnnnnnnnnnnnnnnnnnnnnnnnnnnnnnnnnnnnnnnnnnnnnnnnnnnnnnnnnnnnnnnnnnnnnnnnnnnnnnnnnnnnnnnnnnnnnnnnnnnnnnnnnnnnnnnnnnnnnnnnnnnnnnnnnnnnnnnnnnnnnnnnnnnnnnnnnnnnnnnnnnnnnnnnnnnnnnnnnnnnnnnnnnnnnnnnnnnnnnnnnnnnnnnnnnnnnnnnnnnnnnnnnnnnnnnnnnnnnnnnnnnnnnnnnnnnnnnnnnnnnnnnnnnnnnnnnnnnnnnnnnnnnnnnnnnnnnnnnnnnnnnnnnnnnnnnnnnnnnnnnnnnnnnnnnnnnnnnnnnnnnnnnnnnnnnnnnnnnnnnnnnnnnnnnnnnnnnnnnnnnnnnnnnnnnnnnnnnnnnnnnnnnnnnnnnnnnnnnnnnnnnnnnnnnnnnnnnnnnnnnnnnnnnnnnnnnnnnnnnnnnnnnnnnnnnnnnnnnnnnnnnnnnnnnnnnnnnnnnnnnnnnnnnnnnnnnnnnnnnnnnnnnnnnnnnnnnnnnnnnnnnnnnnnnnnnnnnnnnnnnnnnnnnnnnnnnnnnnnnnnnnnnnnnnnnnnnnnnnnnnnnnnnnnnnnnnnnnnnnnnnnnnnnnnnnnnnnnnnnnnnnnnnnnnnnnnnnnnnnnnnnnnnnnnnnnnnnnnnnnnnnnnnnnnnnnnnnnnnnnnnnnnnnnnnnnnnnnnnnnnnnnnnnnnnnnnnnnnnnnnnnnnnnnnnnnnnnnnnnnnnnnnnnnnnnnnnnnnnnnnnnnnnnnnnnnnnnnnnnnnnnnnnnnnnnnnnnnnnnnnnnnnnnnnnnnnnnnnnnnnnnnnnnnnnnnnnnnnnnnnnnnnnnnnnnnnnnnnnnnnnnnnnnnnnnnnnnnnnnnnnnnnnnnnnnnnnnnnnnnnnnnnnnnnnnnnnnnnnnnnnnnnnnnnnnnnnnnnnnnnnnnnnnnnnnnnnnnnnnnnnnnnnnnnnnnnnnnnnnnnnnnnnnnnnnnnnnnnnnnnnnnnnnnnnnnnnnnnnnnnnnnnnnnnnnnnnnnnnnnnnnnnnnnnnnnnnnnnnnnnnnnnnnnnnnnnnnnnnnnnnnnnnnnnnnnnnnnnnnnnnnnnnnnnnnnnnnnnnnnnnnnnnnnnnnnnnnnnnnnnnnnnnnnnnnnnnnnnnnnnnnnnnnnnnnnnnnnnnnnnnnnnnnnnnnnnnnnnnnnnnnnnnnnnnnnnnnnnnnnnnnnnnnnnnnnnnnnnnnnnnnnnnnnnnnnnnnnnnnnnnnnnnnnnnnnnnnnnnnnnnnnnnnnnnnnnnnnnnnnnnnnnnnnnnnnnnnnnnnnnnnnnnnnnnnnnnnnnnnnnnnnnnnnnnnnnnnnnnnnnnnnnnnnnnnnnnnnnnnnnnnnnnnnnnnnnnnnnnnnnnnnnnnnnnnnnnnnnnnnnnnnnnnnnnnnnnnnnnnnnnnnnnnnnnnnnnnnnnnnnnnnnnnnnnnnnnnnnnnnnnnnnnnnnnnnnnnnnnnnnnnnnnnnnnnnnnnnnnnnnnnnnnnnnnnnnnnnnnnnnnnnnnnnnnnnnnnnnnnnnnnnnnnnnnnnnnnnnnnnnnnnnnnnnnnnnnnnnnnnnnnnnnnnnnnnnnnnnnnnnnnnnnnnnnnnnnnnnnnnnnnnnnnnnnnnnnnnnnnnnnnnnnnnnnnnnnnnnnnnnnnnnnnnnnnnnnnnnnnnnnnnnnnnnnnnnnnnnnnnnnnnnnnnnnnnnnnnnnnnnnnnnnnnnnnnnnnnnnnnnnnnnnnnnnnnnnnnnnnnnnnnnnnnnnnnnnnnnnnnnnnnnnnnnnnnnnnnnnnnnnnnnnnnnnnnnnnnnnnnnnnnnnnnnnnnnnnnnnnnnnnnnnnnnnnnnnnnnnnnnnnnnnnnnnnnnnnnnnnnnnnnnnnnnnnnnnnnnnnnnnnnnnnnnnnnnnnnnnnnnnnnnnnnnnnnnnnnnnnnnnnnnnnnnnnnnnnnnnnnnnnnnnnnnnnnnnnnnnnnnnnnnnnnnnnnnnnnnnnnnnnnnnnnnnnnnnnnnnnnnnnnnnnnnnnnnnnnnnnnnnnnnnnnnnnnnnnnnnnnnnnnnnnnnnnnnnnnnnnnnnnnnnnnnnnnnnnnnnnnnnnnnnnnnnnnnnnnnnnnnnnnnnnnnnnnnnnnnnnnnnnnnnnnnnnnnnnnnnnnnnnnnnnnnnnnnnnnnnnnnnnnnnnnnnnnnnnnnnnnnnnnnnnnnnnnnnnnnnnnnnnnnnnnnnnnnnnnnnnnnnnnnnnnnnnnnnnnnnnnnnnnnnnnnnnnnnnnnnnnnnnnnnnnnnnnnnnnnnnnnnnnnnnnnnnnnnnnnnnnnnnnnnnnnnnnnnnnnnnnnnnnnnnnnnnnnnnnnnnnnnnnnnnnnnnnnnnnnnnnnnnnnnnnnnnnnnnnnnnnnnnnnnnnnnnnnnnnnnnnnnnnnnnnnnnnnnnnnnnnnnnnnnnnnnnnnnnnnnnnnnnnnnnnnnnnnnnnnnnnnnnnnnnnnnnnnnnnnnnnnnnnnnnnnnnnnnnnnnnnnnnnnnnnnnnnnnnnnnnnnnnnnnnnnnnnnnnnnnnnnnnnnnnnnnnnnnnnnnnnnnnnnnnnnnnnnnnnnnnnnnnnnnnnnnnnnnnnnnnnnnnnnnnnnnnnnnnnnnnnnnnnnnnnnnnnnnnnnnnnnnnnnnnnnnnnnnnnnnnnnnnnnnnnnnnnnnnnnnnnnnnnnnnnnnnnnnnnnnnnnnnnnnnnnnnnnnnnnnnnnnnnnnnnnnnnnnnnnnnnnnnnnnnnnnnnnnnnnnnnnnnnnnnnnnnnnnnnnnnnnnnnnnnnnnnnnnnnnnnnnnnnnnnnnnnnnnnnnnnnnnnnnnnnnnnnnnnnnnnnnnnnnnnnnnnnnnnnnnnnnnnnnnnnnnnnnnnnnnnnnnnnnnnnnnnnnnnnnnnnnnnnnnnnnnnnnnnnnnnnnnnnnnnnnnnnnnnnnnnnnnnnnnnnnnnnnnnnnnnnnnnnnnnnnnnnnnnnnnnnnnnnnnnnnnnnnnnnnnnnnnnnnnnnnnnnnnnnnnnnnnnnnnnnnnnnnnnnnnnnnnnnnnnnnnnnnnnnnnnnnnnnnnnnnnnnnnnnnnnnnnnnnnnnnnnnnnnnnnnnnnnnnnnnnnnnnnnnnnnnnnnnnnnnnnnnnnnnnnnnnnnnnnnnnnnnnnnnnnnnnnnnnnnnnnnnnnnnnnnnnnnnnnnnnnnnnnnnnnnnnnnnnnnnnnnnnnnnnnnnnnnnnnnnnnnnnnnnnnnnnnnnnnnnnnnnnnnnnnnnnnnnnnnnnnnnnnnnnnnnnnnnnnnnnnnnnnnnnnnnnnnnnnnnnnnnnnnnnnnnnnnnnnnnnnnnnnnnnnnnnnnnnnnnnnnnnnnnnnnnnnnnnnnnnnnnnnnnnnnnnnnnnnnnnnnnnnnnnnnnnnnnnnnnnnnnnnnnnnnnnnnnnnnnnnnnnnnnnnnnnnnnnnnnnnnnnnnnnnnnnnnnnnnnnnnnnnnnnnnnnnnnnnnnnnnnnnnnnnnnnnnnnnnnnnnnnnnnnnnnnnnnnnnnnnnnnnnnnnnnnnnnnnnnnnnnnnnnnnnnnnnnnnnnnnnnnnnnnnnnnnnnnnnnnnnnnnnnnnnnnnnnnnnnnnnnnnnnnnnnnnnnnnnnnnnnnnnnnnnnnnnnnnnnnnnnnnnnnnnnnnnnnnnnnnnnnnnnnnnnnnnnnnnnnnnnnnnnnnnnnnnnnnnnnnnnnnnnnnnnnnnnnnnnnnnnnnnnnnnnnnnnnnnnnnnnnnnnnnnnnnnnnnnnnnnnnnnnnnnnnnnnnnnnnnnnnnnnnnnnnnnnnnnnnnnnnnnnnnnnnnnnnnnnnnnnnnnnnnnnnnnnnnnnnnnnnnnnnnnnnnnnnnnnnnnnnnnnnnnnnnnnnnnnnnnnnnnnnnnnnnnnnnnnnnnnnnnnnnnnnnnnnnnnnnnnnnnnnnnnnnnnnnnnnnnnnnnnnnnnnnnnnnnnnnnnnnnnnnnnnnnnnnnnnnnnnnnnnnnnnnnnnnnnnnnnnnnnnnnnnnnnnnnnnnnnnnnnnnnnnnnnnnnnnnnnnnnnnnnnnnnnnnnnnnnnnnnnnnnnnnnnnnnnnnnnnnnnnnnnnnnnnnnnnnnnnnnnnnnnnnnnnnnnnnnnnnnnnnnnnnnnnnnnnnnnnnnnnnnnnnnnnnnnnnnnnnnnnnnnnnnnnnnnnnnnnnnnnnnnnnnnnnnnnnnnnnnnnnnnnnnnnnnnnnnnnnnnnnnnnnnnnnnnnnnnnnnnnnnnnnnnnnnnnnnnnnnnnnnnnnnnnnnnnnnnnnnnnnnnnnnnnnnnnnnnnnnnnnnnnnnnnnnnnnnnnnnnnnnnnnnnnnnnnnnnnnnnnnnnnnnnnnnnnnnnnnnnnnnnnnnnnnnnnnnnnnnnnnnnnnnnnnnnnnnnnnnnnnnnnnnnnnnnnnnnnnnnnnnnnnnnnnnnnnnnnnnnnnnnnnnnnnnnnnnnnnnnnnnnnnnnnnnnnnnnnnnnnnnnnnnnnnnnnnnnnnnnnnnnnnnnnnnnnnnnnnnnnnnnnnnnnnnnnnnnnnnnnnnnnnnnnnnnnnnnnnnnnnnnnnnnnnnnnnnnnnnnnnnnnnnnnnnnnnnnnnnnnnnnnnnnnnnnnnnnnnnnnnnnnnnnnnnnnnnnnnnnnnnnnnnnnnnnnnnnnnnnnnnnnnnnnnnnnnnnnnnnnnnnnnnnnnnnnnnnnnnnnnnnnnnnnnnnnnnnnnnnnnnnnnnnnnnnnnnnnnnnnnnnnnnnnnnnnnnnnnnnnnnnnnnnnnnnnnnnnnnnnnnnnnnnnnnnnnnnnnnnnnnnnnnnnnnnnnnnnnnnnnnnnnnnnnnnnnnnnnnnnnnnnnnnnnnnnnnnnnnnnnnnnnnnnnnnnnnnnnnnnnnnnnnnnnnnnnnnnnnnnnnnnnnnnnnnnnnnnnnnnnnnnnnnnnnnnnnnnnnnnnnnnnnnnnnnnnnnnnnnnnnnnnnnnnnnnnnnnnnnnnnnnnnnnnnnnnnnnnnnnnnnnnnnnnnnnnnnnnnnnnnnnnnnnnnnnnnnnnnnnnnnnnnnnnnnnnnnnnnnnnnnnnnnnnnnnnnnnnnnnnnnnnnnnnnnnnnnnnnnnnnnnnnnnnnnnnnnnnnnnnnnnnnnnnnnnnnnnnnnnnnnnnnnnnnnnnnnnnnnnnnnnnnnnnnnnnnnnnnnnnnnnnnnnnnnnnnnnnnnnnnnnnnnnnnnnnnnnnnnnnnnnnnnnnnnnnnnnnnnnnnnnnnnnnnnnnnnnnnnnnnnnnnnnnnnnnnnnnnnnnnnnnnnnnnnnnnnnnnnnnnnnnnnnnnnnnnnnnnnnnnnnnnnnnnnnnnnnnnnnnnnnnnnnnnnnnnnnnnnnnnnnnnnnnnnnnnnnnnnnnnnnnnnnnnnnnnnnnnnnnnnnnnnnnnnnnnnnnnnnnnnnnnnnnnnnnnnnnnnnnnnnnnnnnnnnnnnnnnnnnnnnnnnnnnnnnnnnnnnnnnnnnnnnnnnnnnnnnnnnnnnnnnnnnnnnnnnnnnnnnnnnnnnnnnnnnnnnnnnnnnnnnnnnnnnnnnnnnnnnnnnnnnnnnnnnnnnnnnnnnnnnnnnnnnnnnnnnnnnnnnnnnnnnnnnnnnnnnnnnnnnnnnnnnnnnnnnnnnnnnnnnnnnnnnnnnnnnnnnnnnnnnnnnnnnnnnnnnnnnnnnnnnnnnnnnnnnnnnnnnnnnnnnnnnnnnnnnnnnnnnnnnnnnnnnnnnnnnnnnnnnnnnnnnnnnnnnnnnnnnnnnnnnnnnnnnnnnnnnnnnnnnnnnnnnnnnnnnnnnnnnnnnnnnnnnnnnnnnnnnnnnnnnnnnnnnnnnnnnnnnnnnnnnnnnnnnnnnnnnnnnnnnnnnnnnnnnnnnnnnnnnnnnnnnnnnnnnnnnnnnnnnnnnnnnnnnnnnnnnnnnnnnnnnnnnnnnnnnnnnnnnnnnnnnnnnnnnnnnnnnnnnnnnnnnnnnnnnnnnnnnnnnnnnnnnnnnnnnnnnnnnnnnnnnnnnnnnnnnnnnnnnnnnnnnnnnnnnnnnnnnnnnnnnnnnnnnnnnnnnnnnnnnnnnnnnnnnnnnnnnnnnnnnnnnnnnnnnnnnnnnnnnnnnnnnnnnnnnnnnnnnnnnnnnnnnnnnnnnnnnnnnnnnnnnnnnnnnnnnnnnnnnnnnnnnnnnnnnnnnnnnnnnnnnnnnnnnnnnnnnnnnnnnnnnnnnnnnnnnnnnnnnnnnnnnnnnnnnnnnnnnnnnnnnnnnnnnnnnnnnnnnnnnnnnnnnnnnnnnnnnnnnnnnnnnnnnnnnnnnnnnnnnnnnnnnnnnnnnnnnnnnnnnnnnnnnnnnnnnnnnnnnnnnnnnnnnnnnnnnnnnnnnnnnnnnnnnnnnnnnnnnnnnnnnnnnnnnnnnnnnnnnnnnnnnnnnnnnnnnnnnnnnnnnnnnnnnnnnnnnnnnnnnnnnnnnnnnnnnnnnnnnnnnnnnnnnnnnnnnnnnnnnnnnnnnnnnnnnnnnnnnnnnnnnnnnnnnnnnnnnnnnnnnnnnnnnnnnnnnnnnnnnnnnnnnnnnnnnnnnnnnnnnnnnnnnnnnnnnnnnnnnnnnnnnnnnnnnnnnnnnnnnnnnnnnnnnnnnnnnnnnnnnnnnnnnnnnnnnnnnnnnnnnnnnnnnnnnnnnnnnnnnnnnnnnnnnnnnnnnnnnnnnnnnnnnnnnnnnnnnnnnnnnnnnnnnnnnnnnnnnnnnnnnnnnnnnnnnnnnnnnnnnnnnnnnnnnnnnnnnnnnnnnnnnnnnnnnnnnnnnnnnnnnnnnnnnnnnnnnnnnnnnnnnnnnnnnnnnnnnnnnnnnnnnnnnnnnnnnnnnnnnnnnnnnnnnnnnnnnnnnnnnnnnnnnnnnnnnnnnnnnnnnnnnnnnnnnnnnnnnnnnnnnnnnnnnnnnnnnnnnnnnnnnnnnnnnnnnnnnnnnnnnnnnnnnnnnnnnnnnnnnnnnnnnnnnnnnnnnnnnnnnnnnnnnnnnnnnnnnnnnnnnnnnnnnnnnnnnnnnnnnnnnnnnnnnnnnnnnnnnnnnnnnnnnnnnnnnnnnnnnnnnnnnnnnnnnnnnnnnnnnnnnnnnnnnnnnnnnnnnnnnnnnnnnnnnnnnnnnnnnnnnnnnnnnnnnnnnnnnnnnnnnnnnnnnnnnnnnnnnnnnnnnnnnnnnnnnnnnnnnnnnnnnnnnnnnnnnnnnnnnnnnnnnnnnnnnnnnnnnnnnnnnnnnnnnnnnnnnnnnnnnnnnnnnnnnnnnnnnnnnnnnnnnnnnnnnnnnnnnnnnnnnnnnnnnnnnnnnnnnnnnnnnnnnnnnnnnnnnnnnnnnnnnnnnnnnnnnnnnnnnnnnnnnnnnnnnnnnnnnnnnnnnnnnnnnnnnnnnnnnnnnnnnnnnnnnnnnnnnnnnnnnnnnnnnnnnnnnnnnnnnnnnnnnnnnnnnnnnnnnnnnnnnnnnnnnnnnnnnnnnnnnnnnnnnnnnnnnnnnnnnnnnnnnnnnnnnnnnnnnnnnnnnnnnnnnnnnnnnnnnnnnnnnnnnnnnnnnnnnnnnnnnnnnnnnnnnnnnnnnnnnnnnnnnnnnnnnnnnnnnnnnnnnnnnnnnnnnnnnnnnnnnnnnnnnnnnnnnnnnnnnnnnnnnnnnnnnnnnnnnnnnnnnnnnnnnnnnnnnnnnnnnnnnnnnnnnnnnnnnnnnnnnnnnnnnnnnnnnnnnnnnnnnnnnnnnnnnnnnnnnnnnnnnnnnnnnnnnnnnnnnnnnnnnnnnnnnnnnnnnnnnnnnnnnnnnnnnnnnnnnnnnnnnnnnnnnnnnnnnnnnnnnnnnnnnnnnnnnnnnnnnnnnnnnnnnnnnnnnnnnnnnnnnnnnnnnnnnnnnnnnnnnnnnnnnnnnnnnnnnnnnnnnnnnnnnnnnnnnnnnnnnnnnnnnnnnnnnnnnnnnnnnnnnnnnnnnnnnnnnnnnnnnnnnnnnnnnnnnnnnnnnnnnnnnnnnnnnnnnnnnnnnnnnnnnnnnnnnnnnnnnnnnnnnnnnnnnnnnnnnnnnnnnnnnnnnnnnnnnnnnnnnnnnnnnnnnnnnnnnnnnnnnnnnnnnnnnnnnnnnnnnnnnnnnnnnnnnnnnnnnnnnnnnnnnnnnnnnnnnnnnnnnnnnnnnnnnnnnnnnnnnnnnnnnnnnnnnnnnnnnnnnnnnnnnnnnnnnnnnnnnnnnnnnnnnnnnnnnnnnnnnnnnnnnnnnnnnnnnnnnnnnnnnnnnnnnnnnnnnnnnnnnnnnnnnnnnnnnnnnnnnnnnnnnnnnnnnnnnnnnnnnnnnnnnnnnnnnnnnnnnnnnnnnnnnnnnnnnnnnnnnnnnnnnnnnnnnnnnnnnnnnnnnnnnnnnnnnnnnnnnnnnnnnnnnnnnnnnnnnnnnnnnnnnnnnnnnnnnnnnnnnnnnnnnnnnnnnnnnnnnnnnnnnnnnnnnnnnnnnnnnnnnnnnnnnnnnnnnnnnnnnnnnnnnnnnnnnnnnnnnnnnnnnnnnnnnnnnnnnnnnnnnnnnnnnnnnnnnnnnnnnnnnnnnnnnnnnnnnnnnnnnnnnnnnnnnnnnnnnnnnnnnnnnnnnnnnnnnnnnnnnnnnnnnnnnnnnnnnnnnnnnnnnnnnnnnnnnnnnnnnnnnnnnnnnnnnnnnnnnnnnnnnnnnnnnnnnnnnnnnnnnnnnnnnnnnnnnnnnnnnnnnnnnnnnnnnnnnnnnnnnnnnnnnnnnnnnnnnnnnnnnnnnnnnnnnnnnnnnnnnnnnnnnnnnnnnnnnnnnnnnnnnnnnnnnnnnnnnnnnnnnnnnnnnnnnnnnnnnnnnnnnnnnnnnnnnnnnnnnnnnnnnnnnnnnnnnnnnnnnnnnnnnnnnnnnnnnnnnnnnnnnnnnnnnnnnnnnnnnnnnnnnnnnnnnnnnnnnnnnnnnnnnnnnnnnnnnnnnnnnnnnnnnnnnnnnnnnnnnnnnnnnnnnnnnnnnnnnnnnnnnnnnnnnnnnnnnnnnnnnnnnnnnnnnnnnnnnnnnnnnnnnnnnnnnnnnnnnnnnnnnnnnnnnnnnnnnnnnnnnnnnnnnnnnnnnnnnnnnnnnnnnnnnnnnnnnnnnnnnnnnnnnnnnnnnnnnnnnnnnnnnnnnnnnnnnnnnnnnnnnnnnnnnnnnnnnnnnnnnnnnnnnnnnnnnnnnnnnnnnnnnnnnnnnnnnnnnnnnnnnnnnnnnnnnnnnnnnnnnnnnnnnnnnnnnnnnnnnnnnnnnnnnnnnnnnnnnnnnnnnnnnnnnnnnnnnnnnnnnnnnnnnnnnnnnnnnnnnnnnnnnnnnnnnnnnnnnnnnnnnnnnnnnnnnnnnnnnnnnnnnnnnnnnnnnnnnnnnnnnnnnnnnnnnnnnnnnnnnnnnnnnnnnnnnnnnnnnnnnnnnnnnnnnnnnnnnnnnnnnnnnnnnnnnnnnnnnnnnnnnnnnnnnnnnnnnnnnnnnnnnnnnnnnnnnnnnnnnnnnnnnnnnnnnnnnnnnnnnnnnnnnnnnnnnnnnnnnnnnnnnnnnnnnnnnnnnnnnnnnnnnnnnnnnnnnnnnnnnnnnnnnnnnnnnnnnnnnnnnnnnnnnnnnnnnnnnnnnnnnnnnnnnnnnnnnnnnnnnnnnnnnnnnnnnnnnnnnnnnnnnnnnnnnnnnnnnnnnnnnnnnnnnnnnnnnnnnnnnnnnnnnnnnnnnnnnnnnnnnnnnnnnnnnnnnnnnnnnnnnnnnnnnnnnnnnnnnnnnnnnnnnnnnnnnnnnnnnnnnnnnnnnnnnnnnnnnnnnnnnnnnnnnnnnnnnnnnnnnnnnnnnnnnnnnnnnnnnnnnnnnnnnnnnnnnnnnnnnnnnnnnnnnnnnnnnnnnnnnnnnnnnnnnnnnnnnnnnnnnnnnnnnnnnnnnnnnnnnnnnnnnnnnnnnnnnnnnnnnnnnnnnnnnnnnnnnnnnnnnnnnnnnnnnnnnnnnnnnnnnnnnnnnnnnnnnnnnnnnnnnnnnnnnnnnnnnnnnnnnnnnnnnnnnnnnnnnnnnnnnnnnnnnnnnnnnnnnnnnnnnnnnnnnnnnnnnnnnnnnnnnnnnnnnnnnnnnnnnnnnnnnnnnnnnnnnnnnnnnnnnnnnnnnnnnnnnnnnnnnnnnnnnnnnnnnnnnnnnnnnnnnnnnnnnnnnnnnnnnnnnnnnnnnnnnnnnnnnnnnnnnnnnnnnnnnnnnnnnnnnnnnnnnnnnnnnnnnnnnnnnnnnnnnnnnnnnnnnnnnnnnnnnnnnnnnnnnnnnnnnnnnnnnnnnnnnnnnnnnnnnnnnnnnnnnnnnnnnnnnnnnnnnnnnnnnnnnnnnnnnnnnnnnnnnnnnnnnnnnnnnnnnnnnnnnnnnnnnnnnnnnnnnnnnnnnnnnnnnnnnnnnnnnnnnnnnnnnnnnnnnnnnnnnnnnnnnnnnnnnnnnnnnnnnnnnnnnnnnnnnnnnnnnnnnnnnnnnnnnnnnnnnnnnnnnnnnnnnnnnnnnnnnnnnnnnnnnnnnnnnnnnnnnnnnnnnnnnnnnnnnnnnnnnnnnnnnnnnnnnnnnnnnnnnnnnnnnnnnnnnnnnnnnnnnnnnnnnnnnnnnnnnnnnnnnnnnnnnnnnnnnnnnnnnnnnnnnnnnnnnnnnnnnnnnnnnnnnnnnnnnnnnnnnnnnnnnnnnnnnnnnnnnnnnnnnnnnnnnnnnnnnnnnnnnnnnnnnnnnnnnnnnnnnnnnnnnnnnnnnnnnnnnnnnnnnnnnnnnnnnnnnnnnnnnnnnnnnnnnnnnnnnnnnnnnnnnnnnnnnnnnnnnnnnnnnnnnnnnnnnnnnnnnnnnnnnnnnnnnnnnnnnnnnnnnnnnnnnnnnnnnnnnnnnnnnnnnnnnnnnnnnnnnnnnnnnnnnnnnnnnnnnnnnnnnnnnnnnnnnnnnnnnnnnnnnnnnnnnnnnnnnnnnnnnnnnnnnnnnnnnnnnnnnnnnnnnnnnnnnnnnnnnnnnnnnnnnnnnnnnnnnnnnnnnnnnnnnnnnnnnnnnnnnnnnnnnnnnnnnnnnnnnnnnnnnnnnnnnnnnnnnnnnnnnnnnnnnnnnnnnnnnnnnnnnnnnnnnnnnnnnnnnnnnnnnnnnnnnnnnnnnnnnnnnnnnnnnnnnnnnnnnnnnnnnnnnnnnnnnnnnnnnnnnnnnnnnnnnnnnnnnnnnnnnnnnnnnnnnnnnnnnnnnnnnnnnnnnnnnnnnnnnnnnnnnnnnnnnnnnnnnnnnnnnnnnnnnnnnnnnnnnnnnnnnnnnnnnnnnnnnnnnnnnnnnnnnnnnnnnnnnnnnnnnnnnnnnnnnnnnnnnnnnnnnnnnnnnnnnnnnnnnnnnnnnnnnnnnnnnnnnnnnnnnnnnnnnnnnnnnnnnnnnnnnnnnnnnnnnnnnnnnnnnnnnnnnnnnnnnnnnnnnnnnnnnnnnnnnnnnnnnnnnnnnnnnnnnnnnnnnnnnnnnnnnnnnnnnnnnnnnnnnnnnnnnnnnnnnnnnnnnnnnnnnnnnnnnnnnnnnnnnnnnnnnnnnnnnnnnnnnnnnnnnnnnnnnnnnnnnnnnnnnnnnnnnnnnnnnnnnnnnnnnnnnnnnnnnnnnnnnnnnnnnnnnnnnnnnnnnnnnnnnnnnnnnnnnnnnnnnnnnnnnnnnnnnnnnnnnnnnnnnnnnnnnnnnnnnnnnnnnnnnnnnnnnnnnnnnnnnnnnnnnnnnnnnnnnnnnnnnnnnnnnnnnnnnnnnnnnnnnnnnnnnnnnnnnnnnnnnnnnnnnnnnnnnnnnnnnnnnnnnnnnnnnnnnnnnnnnnnnnnnnnnnnnnnnnnnnnnnnnnnnnnnnnnnnnnnnnnnnnnnnnnnnnnnnnnnnnnnnnnnnnnnnnnnnnnnnnnnnnnnnnnnnnnnnnnnnnnnnnnnnnnnnnnnnnnnnnnnnnnnnnnnnnnnnnnnnnnnnnnnnnnnnnnnnnnnnnnnnnnnnnnnnnnnnnnnnnnnnnnnnnnnnnnnnnnnnnnnnnnnnnnnnnnnnnnnnnnnnnnnnnnnnnnnnnnnnnnnnnnnnnnnnnnnnnnnnnnnnnnnnnnnnnnnnnnnnnnnnnnnnnnnnnnnnnnnnnnnnnnnnnnnnnnnnnnnnnnnnnnnnnnnnnnnnnnnnnnnnnnnnnnnnnnnnnnnnnnnnnnnnnnnnnnnnnnnnnnnnnnnnnnnnnnnnnnnnnnnnnnnnnnnnnnnnnnnnnnnnnnnnnnnnnnnnnnnnnnnnnnnnnnnnnnnnnnnnnnnnnnnnnnnnnnnnnnnnnnnnnnnnnnnnnnnnnnnnnnnnnnnnnnnnnnnnnnnnnnnnnnnnnnnnnnnnnnnnnnnnnnnnnnnnnnnnnnnnnnnnnnnnnnnnnnnnnnnnnnnnnnnnnnnnnnnnnnnnnnnnnnnnnnnnnnnnnnnnnnnnnnnnnnnnnnnnnnnnnnnnnnnnnnnnnnnnnnnnnnnnnnnnnnnnnnnnnnnnnnnnnnnnnnnnnnnnnnnnnnnnnnnnnnnnnnnnnnnnnnnnnnnnnnnnnnnnnnnnnnnnnnnnnnnnnnnnnnnnnnnnnnnnnnnnnnnnnnnnnnnnnnnnnnnnnnnnnnnnnnnnnnnnnnnnnnnnnnnnnnnnnnnnnnnnnnnnnnnnnnnnnnnnnnnnnnnnnnnnnnnnnnnnnnnnnnnnnnnnnnnnnnnnnnnnnnnnnnnnnnnnnnnnnnnnnnnnnnnnnnnnnnnnnnnnnnnnnnnnnnnnnnnnnnnnnnnnnnnnnnnnnnnnnnnnnnnnnnnnnnnnnnnnnnnnnnnnnnnnnnnnnnnnnnnnnnnnnnnnnnnnnnnnnnnnnnnnnnnnnnnnnnnnnnnnnnnnnnnnnnnnnnnnnnnnnnnnnnnnnnnnnnnnnnnnnnnnnnnnnnnnnnnnnnnnnnnnnnnnnnnnnnnnnnnnnnnnnnnnnnnnnnnnnnnnnnnnnnnnnnnnnnnnnnnnnnnnnnnnnnnnnnnnnnnnnnnnnnnnnnnnnnnnnnnnnnnnnnnnnnnnnnnnnnnnnnnnnnnnnnnnnnnnnnnnnnnnnnnnnnnnnnnnnnnnnnnnnnnnnnnnnnnnnnnnnnnnnnnnnnnnnnnnnnnnnnnnnnnnnnnnnnnnnnnnnnnnnnnnnnnnnnnnnnnnnnnnnnnnnnnnnnnnnnnnnnnnnnnnnnnnnnnnnnnnnnnnnnnnnnnnnnnnnnnnnnnnnnnnnnnnnnnnnnnnnnnnnnnnnnnnnnnnnnnnnnnnnnnnnnnnnnnnnnnnnnnnnnnnnnnnnnnnnnnnnnnnnnnnnnnnnnnnnnnnnnnnnnnnnnnnnnnnnnnnnnnnnnnnnnnnnnnnnnnnnnnnnnnnnnnnnnnnnnnnnnnnnnnnnnnnnnnnnnnnnnnnnnnnnnnnnnnnnnnnnnnnnnnnnnnnnnnnnnnnnnnnnnnnnnnnnnnnnnnnnnnnnnnnnnnnnnnnnnnnnnnnnnnnnnnnnnnnnnnnnnnnnnnnnnnnnnnnnnnnnnnnnnnnnnnnnnnnnnnnnnnnnnnnnnnnnnnnnnnnnnnnnnnnnnnnnnnnnnnnnnnnnnnnnnnnnnnnnnnnnnnnnnnnnnnnnnnnnnnnnnnnnnnnnnnnnnnnnnnnnnnnnnnnnnnnnnnnnnnnnnnnnnnnnnnnnnnnnnnnnnnnnnnnnnnnnnnnnnnnnnnnnnnnnnnnnnnnnnnnnnnnnnnnnnnnnnnnnnnnnnnnnnnnnnnnnnnnnnnnnnnnnnnnnnnnnnnnnnnnnnnnnnnnnnnnnnnnnnnnnnnnnnnnnnnnnnnnnnnnnnnnnnnnnnnnnnnnnnnnnnnnnnnnnnnnnnnnnnnnnnnnnnnnnnnnnnnnnnnnnnnnnnnnnnnnnnnnnnnnnnnnnnnnnnnnnnnnnnnnnnnnnnnnnnnnnnnnnnnnnnnnnnnnnnnnnnnnnnnnnnnnnnnnnnnnnnnnnnnnnnnnnnnnnnnnnnnnnnnnnnnnnnnnnnnnnnnnnnnnnnnnnnnnnnnnnnnnnnnnnnnnnnnnnnnnnnnnnnnnnnnnnnnnnnnnnnnnnnnnnnnnnnnnnnnnnnnnnnnnnnnnnnnnnnnnnnnnnnnnnnnnnnnnnnnnnnnnnnnnnnnnnnnnnnnnnnnnnnnnnnnnnnnnnnnnnnnnnnnnnnnnnnnnnnnnnnnnnnnnnnnnnnnnnnnnnnnnnnnnnnnnnnnnnnnnnnnnnnnnnnnnnnnnnnnnnnnnnnnnnnnnnnnnnnnnnnnnnnnnnnnnnnnnnnnnnnnnnnnnnnnnnnnnnnnnnnnnnnnnnnnnnnnnnnnnnnnnnnnnnnnnnnnnnnnnnnnnnnnnnnnnnnnnnnnnnnnnnnnnnnnnnnnnnnnnnnnnnnnnnnnnnnnnnnnnnnnnnnnnnnnnnnnnnnnnnnnnnnnnnnnnnnnnnnnnnnnnnnnnnnnnnnnnnnnnnnnnnnnnnnnnnnnnnnnnnnnnnnnnnnnnnnnnnnnnnnnnnnnnnnnnnnnnnnnnnnnnnnnnnnnnnnnnnnnnnnnnnnnnnnnnnnnnnnnnnnnnnnnnnnnnnnnnnnnnnnnnnnnnnnnnnnnnnnnnnnnnnnnnnnnnnnnnnnnnnnnnnnnnnnnnnnnnnnnnnnnnnnnnnnnnnnnnnnnnnnnnnnnnnnnnnnnnnnnnnnnnnnnnnnnnnnnnnnnnnnnnnnnnnnnnnnnnnnnnnnnnnnnnnnnnnnnnnnnnnnnnnnnnnnnnnnnnnnnnnnnnnnnnnnnnnnnnnnnnnnnnnnnnnnnnnnnnnnnnnnnnnnnnnnnnnnnnnnnnnnnnnnnnnnnnnnnnnnnnnnnnnnnnnnnnnnnnnnnnnnnnnnnnnnnnnnnnnnnnnnnnnnnnnnnnnnnnnnnnnnnnnnnnnnnnnnnnnnnnnnnnnnnnnnnnnnnnnnnnnnnnnnnnnnnnnnnnnnnnnnnnnnnnnnnnnnnnnnnnnnnnnnnnnnnnnnnnnnnnnnnnnnnnnnnnnnnnnnnnnnnnnnnnnnnnnnnnnnnnnnnnnnnnnnnnnnnnnnnnnnnnnnnnnnnnnnnnnnnnnnnnnnnnnnnnnnnnnnnnnnnnnnnnnnnnnnnnnnnnnnnnnnnnnnnnnnnnnnnnnnnnnnnnnnnnnnnnnnnnnnnnnnnnnnnnnnnnnnnnnnnnnnnnnnnnnnnnnnnnnnnnnnnnnnnnnnnnnnnnnnnnnnnnnnnnnnnnnnnnnnnnnnnnnnnnnnnnnnnnnnnnnnnnnnnnnnnnnnnnnnnnnnnnnnnnnnnnnnnnnnnnnnnnnnnnnnnnnnnnnnnnnnnnnnnnnnnnnnnnnnnnnnnnnnnnnnnnnnnnnnnnnnnnnnnnnnnnnnnnnnnnnnnnnnnnnnnnnnnnnnnnnnnnnnnnnnnnnnnnnnnnnnnnnnnnnnnnnnnnnnnnnnnnnnnnnnnnnnnnnnnnnnnnnnnnnnnnnnnnnnnnnnnnnnnnnnnnnnnnnnnnnnnnnnnnnnnnnnnnnnnnnnnnnnnnnnnnnnnnnnnnnnnnnnnnnnnnnnnnnnnnnnnnnnnnnnnnnnnnnnnnnnnnnnnnnnnnnnnnnnnnnnnnnnnnnnnnnnnnnnnnnnnnnnnnnnnnnnnnnnnnnnnnnnnnnnnnnnnnnnnnnnnnnnnnnnnnnnnnnnnnnnnnnnnnnnnnnnnnnnnnnnnnnnnnnnnnnnnnnnnnnnnnnnnnnnnnnnnnnnnnnnnnnnnnnnnnnnnnnnnnnnnnnnnnnnnnnnnnnnnnnnnnnnnnnnnnnnnnnnnnnnnnnnnnnnnnnnnnnnnnnnnnnnnnnnnnnnnnnnnnnnnnnnnnnnnnnnnnnnnnnnnnnnnnnnnnnnnnnnnnnnnnnnnnnnnnnnnnnnnnnnnnnnnnnnnnnnnnnnnnnnnnnnnnnnnnnnnnnnnnnnnnnnnnnnnnnnnnnnnnnnnnnnnnnnnnnnnnnnnnnnnnnnnnnnnnnnnnnnnnnnnnnnnnnnnnnnnnnnnnnnnnnnnnnnnnnnnnnnnnnnnnnnnnnnnnnnnnnnnnnnnnnnnnnnnnnnnnnnnnnnnnnnnnnnnnnnnnnnnnnnnnnnnnnnnnnnnnnnnnnnnnnnnnnnnnnnnnnnnnnnnnnnnnnnnnnnnnnnnnnnnnnnnnnnnnnnnnnnnnnnnnnnnnnnnnnnnnnnnnnnnnnnnnnnnnnnnnnnnnnnnnnnnnnnnnnnnnnnnnnnnnnnnnnnnnnnnnnnnnnnnnnnnnnnnnnnnnnnnnnnnnnnnnnnnnnnnnnnnnnnnnnnnnnnnnnnnnnnnnnnnnnnnnnnnnnnnnnnnnnnnnnnnnnnnnnnnnnnnnnnnnnnnnnnnnnnnnnnnnnnnnnnnnnnnnnnnnnnnnnnnnnnnnnnnnnnnnnnnnnnnnnnnnnnnnnnnnnnnnnnnnnnnnnnnnnnnnnnnnnnnnnnnnnnnnnnnnnnnnnnnnnnnnnnnnnnnnnnnnnnnnnnnnnnnnnnnnnnnnnnnnnnnnnnnnnnnnnnnnnnnnnnnnnnnnnnnnnnnnnnnnnnnnnnnnnnnnnnnnnnnnnnnnnnnnnnnnnnnnnnnnnnnnnnnnnnnnnnnnnnnnnnnnnnnnnnnnnnnnnnnnnnnnnnnnnnnnnnnnnnnnnnnnnnnnnnnnnnnnnnnnnnnnnnnnnnnnnnnnnnnnnnnnnnnnnnnnnnnnnnnnnnnnnnnnnnnnnnnnnnnnnnnnnnnnnnnnnnnnnnnnnnnnnnnnnnnnnnnnnnnnnnnnnnnnnnnnnnnnnnnnnnnnnnnnnnnnnnnnnnnnnnnnnnnnnnnnnnnnnnnnnnnnnnnnnnnnnnnnnnnnnnnnnnnnnnnnnnnnnnnnnnnnnnnnnnnnnnnnnnnnnnnnnnnnnnnnnnnnnnnnnnnnnnnnnnnnnnnnnnnnnnnnnnnnnnnnnnnnnnnnnnnnnnnnnnnnnnnnnnnnnnnnnnnnnnnnnnnnnnnnnnnnnnnnnnnnnnnnnnnnnnnnnnnnnnnnnnnnnnnnnnnnnnnnnnnnnnnnnnnnnnnnnnnnnnnnnnnnnnnnnnnnnnnnnnnnnnnnnnnnnnnnnnnnnnnnnnnnnnnnnnnnnnnnnnnnnnnnnnnnnnnnnnnnnnnnnnnnnnnnnnnnnnnnnnnnnnnnnnnnnnnnnnnnnnnnnnnnnnnnnnnnnnnnnnnnnnnnnnnnnnnnnnnnnnnnnnnnnnnnnnnnnnnnnnnnnnnnnnnnnnnnnnnnnnnnnnnnnnnnnnnnnnnnnnnnnnnnnnnnnnnnnnnnnnnnnnnnnnnnnnnnnnnnnnnnnnnnnnnnnnnnnnnnnnnnnnnnnnnnnnnnnnnnnnnnnnnnnnnnnnnnnnnnnnnnnnnnnnnnnnnnnnnnnnnnnnnnnnnnnnnnnnnnnnnnnnnnnnnnnnnnnnnnnnnnnnnnnnnnnnnnnnnnnnnnnnnnnnnnnnnnnnnnnnnnnnnnnnnnnnnnnnnnnnnnnnnnnnnnnnnnnnnnnnnnnnnnnnnnnnnnnnnnnnnnnnnnnnnnnnnnnnnnnnnnnnnnnnnnnnnnnnnnnnnnnnnnnnnnnnnnnnnnnnnnnnnnnnnnnnnnnnnnnnnnnnnnnnnnnnnnnnnnnnnnnnnnnnnnnnnnnnnnnnnnnnnnnnnnnnnnnnnnnnnnnnnnnnnnnnnnnnnnnnnnnnnnnnnnnnnnnnnnnnnnnnnnnnnnnnnnnnnnnnnnnnnnnnnnnnnnnnnnnnnnnnnnnnnnnnnnnnnnnnnnnnnnnnnnnnnnnnnnnnnnnnnnnnnnnnnnnnnnnnnnnnnnnnnnnnnnnnnnnnnnnnnnnnnnnnnnnnnnnnnnnnnnnnnnnnnnnnnnnnnnnnnnnnnnnnnnnnnnnnnnnnnnnnnnnnnnnnnnnnnnnnnnnnnnnnnnnnnnnnnnnnnnnnnnnnnnnnnnnnnnnnnnnnnnnnnnnnnnnnnnnnnnnnnnnnnnnnnnnnnnnnnnnnnnnnnnnnnnnnnnnnnnnnnnnnnnnnnnnnnnnnnnnnnnnnnnnnnnnnnnnnnnnnnnnnnnnnnnnnnnnnnnnnnnnnnnnnnnnnnnnnnnnnnnnnnnnnnnnnnnnnnnnnnnnnnnnnnnnnnnnnnnnnnnnnnnnnnnnnnnnnnnnnnnnnnnnnnnnnnnnnnnnnnnnnnnnnnnnnnnnnnnnnnnnnnnnnnnnnnnnnnnnnnnnnnnnnnnnnnnnnnnnnnnnnnnnnnnnnnnnnnnnnnnnnnnnnnnnnnnnnnnnnnnnnnnnnnnnnnnnnnnnnnnnnnnnnnnnnnnnnnnnnnnnnnnnnnnnnnnnnnnnnnnnnnnnnnnnnnnnnnnnnnnnnnnnnnnnnnnnnnnnnnnnnnnnnnnnnnnnnnnnnnnnnnnnnnnnnnnnnnnnnnnnnnnnnnnnnnnnnnnnnnnnnnnnnnnnnnnnnnnnnnnnnnnnnnnnnnnnnnnnnnnnnnnnnnnnnnnnnnnnnnnnnnnnnnnnnnnnnnnnnnnnnnnnnnnnnnnnnnnnnnnnnnnnnnnnnnnnnnnnnnnnnnnnnnnnnnnnnnnnnnnnnnnnnnnnnnnnnnnnnnnnnnnnnnnnnnnnnnnnnnnnnnnnnnnnnnnnnnnnnnnnnnnnnnnnnnnnnnnnnnnnnnnnnnnnnnnnnnnnnnnnnnnnnnnnnnnnnnnnnnnnnnnnnnnnnnnnnnnnnnnnnnnnnnnnnnnnnnnnnnnnnnnnnnnnnnnnnnnnnnnnnnnnnnnnnnnnnnnnnnnnnnnnnnnnnnnnnnnnnnnnnnnnnnnnnnnnnnnnnnnnnnnnnnnnnnnnnnnnnnnnnnnnnnnnnnnnnnnnnnnnnnnnnnnnnnnnnnnnnnnnnnnnnnnnnnnnnnnnnnnnnnnnnnnnnnnnnnnnnnnnnnnnnnnnnnnnnnnnnnnnnnnnnnnnnnnnnnnnnnnnnnnnnnnnnnnnnnnnnnnnnnnnnnnnnnnnnnnnnnnnnnnnnnnnnnnnnnnnnnnnnnnnnnnnnnnnnnnnnnnnnnnnnnnnnnnnnnnnnnnnnnnnnnnnnnnnnnnnnnnnnnnnnnnnnnnnnnnnnnnnnnnnnnnnnnnnnnnnnnnnnnnnnnnnnnnnnnnnnnnnnnnnnnnnnnnnnnnnnnnnnnnnnnnnnnnnnnnnnnnnnnnnnnnnnnnnnnnnnnnnnnnnnnnnnnnnnnnnnnnnnnnnnnnnnnnnnnnnnnnnnnnnnnnnnnnnnnnnnnnnnnnnnnnnnnnnnnnnnnnnnnnnnnnnnnnnnnnnnnnnnnnnnnnnnnnnnnnnnnnnnnnnnnnnnnnnnnnnnnnnnnnnnnnnnnnnnnnnnnnnnnnnnnnnnnnnnnnnnnnnnnnnnnnnnnnnnnnnnnnnnnnnnnnnnnnnnnnnnnnnnnnnnnnnnnnnnnnnnnnnnnnnnnnnnnnnnnnnnnnnnnnnnnnnnnnnnnnnnnnnnnnnnnnnnnnnnnnnnnnnnnnnnnnnnnnnnnnnnnnnnnnnnnnnnnnnnnnnnnnnnnnnnnnnnnnnnnnnnnnnnnnnnnnnnnnnnnnnnnnnnnnnnnnnnnnnnnnnnnnnnnnnnnnnnnnnnnnnnnnnnnnnnnnnnnnnnnnnnnnnnnnnnnnnnnnnnnnnnnnnnnnnnnnnnnnnnnnnnnnnnnnnnnnnnnnnnnnnnnnnnnnnnnnnnnnnnnnnnnnnnnnnnnnnnnnnnnnnnnnnnnnnnnnnnnnnnnnnnnnnnnnnnnnnnnnnnnnnnnnnnnnnnnnnnnnnnnnnnnnnnnnnnnnnnnnnnnnnnnnnnnnnnnnnnnnnnnnnnnnnnnnnnnnnnnnnnnnnnnnnnnnnnnnnnnnnnnnnnnnnnnnnnnnnnnnnnnnnnnnnnnnnnnnnnnnnnnnnnnnnnnnnnnnnnnnnnnnnnnnnnnnnnnnnnnnnnnnnnnnnnnnnnnnnnnnnnnnnnnnnnnnnnnnnnnnnnnnnnnnnnnnnnnnnnnnnnnnnnnnnnnnnnnnnnnnnnnnnnnnnnnnnnnnnnnnnnnnnnnnnnnnnnnnnnnnnnnnnnnnnnnnnnnnnnnnnnnnnnnnnnnnnnnnnnnnnnnnnnnnnnnnnnnnnnnnnnnnnnnnnnnnnnnnnnnnnnnnnnnnnnnnnnnnnnnnnnnnnnnnnnnnnnnnnnnnnnnnnnnnnnnnnnnnnnnnnnnnnnnnnnnnnnnnnnnnnnnnnnnnnnnnnnnnnnnnnnnnnnnnnnnnnnnnnnnnnnnnnnnnnnnnnnnnnnnnnnnnnnnnnnnnnnnnnnnnnnnnnnnnnnnnnnnnnnnnnnnnnnnnnnnnnnnnnnnnnnnnnnnnnnnnnnnnnnnnnnnnnnnnnnnnnnnnnnnnnnnnnnnnnnnnnnnnnnnnnnnnnnnnnnnnnnnnnnnnnnnnnnnnnnnnnnnnnnnnnnnnnnnnnnnnnnnnnnnnnnnnnnnnnnnnnnnnnnnnnnnnnnnnnnnnnnnnnnnnnnnnnnnnnnnnnnnnnnnnnnnnnnnnnnnnnnnnnnnnnnnnnnnnnnnnnnnnnnnnnnnnnnnnnnnnnnnnnnnnnnnnnnnnnnnnnnnnnnnnnnnnnnnnnnnnnnnnnnnnnnnnnnnnnnnnnnnnnnnnnnnnnnnnnnnnnnnnnnnnnnnnnnnnnnnnnnnnnnnnnnnnnnnnnnnnnnnnnnnnnnnnnnnnnnnnnnnnnnnnnnnnnnnnnnnnnnnnnnnnnnnnnnnnnnnnnnnnnnnnnnnnnnnnnnnnnnnnnnnnnnnnnnnnnnnnnnnnnnnnnnnnnnnnnnnnnnnnnnnnnnnnnnnnnnnnnnnnnnnnnnnnnnnnnnnnnnnnnnnnnnnnnnnnnnnnnnnnnnnnnnnnnnnnnnnnnnnnnnnnnnnnnnnnnnnnnnnnnnnnnnnnnnnnnnnnnnnnnnnnnnnnnnnnnnnnnnnnnnnnnnnnnnnnnnnnnnnnnnnnnnnnnnnnnnnnnnnnnnnnnnnnnnnnnnnnnnnnnnnnnnnnnnnnnnnnnnnnnnnnnnnnnnnnnnnnnnnnnnnnnnnnnnnnnnnnnnnnnnnnnnnnnnnnnnnnnnnnnnnnnnnnnnnnnnnnnnnnnnnnnnnnnnnnnnnnnnnnnnnnnnnnnnnnnnnnnnnnnnnnnnnnnnnnnnnnnnnnnnnnnnnnnnnnnnnnnnnnnnnnnnnnnnnnnnnnnnnnnnnnnnnnnnnnnnnnnnnnnnnnnnnnnnnnnnnnnnnnnnnnnnnnnnnnnnnnnnnnnnnnnnnnnnnnnnnnnnnnnnnnnnnnnnnnnnnnnnnnnnnnnnnnnnnnnnnnnnnnnnnnnnnnnnnnnnnnnnnnnnnnnnnnnnnnnnnnnnnnnnnnnnnnnnnnnnnnnnnnnnnnnnnnnnnnnnnnnnnnnnnnnnnnnnnnnnnnnnnnnnnnnnnnnnnnnnnnnnnnnnnnnnnnnnnnnnnnnnnnnnnnnnnnnnnnnnnnnnnnnnnnnnnnnnnnnnnnnnnnnnnnnnnnnnnnnnnnnnnnnnnnnnnnnnnnnnnnnnnnnnnnnnnnnnnnnnnnnnnnnnnnnnnnnnnnnnnnnnnnnnnnnnnnnnnnnnnnnnnnnnnnnnnnnnnnnnnnnnnnnnnnnnnnnnnnnnnnnnnnnnnnnnnnnnnnnnnnnnnnnnnnnnnnnnnnnnnnnnnnnnnnnnnnnnnnnnnnnnnnnnnnnnnnnnnnnnnnnnnnnnnnnnnnnnnnnnnnnnnnnnnnnnnnnnnnnnnnnnnnnnnnnnnnnnnnnnnnnnnnnnnnnnnnnnnnnnnnnnnnnnnnnnnnnnnnnnnnnnnnnnnnnnnnnnnnnnnnnnnnnnnnnnnnnnnnnnnnnnnnnnnnnnnnnnnnnnnnnnnnnnnnnnnnnnnnnnnnnnnnnnnnnnnnnnnnnnnnnnnnnnnnnnnnnnnnnnnnnnnnnnnnnnnnnnnnnnnnnnnnnnnnnnnnnnnnnnnnnnnnnnnnnnnnnnnnnnnnnnnnnnnnnnnnnnnnnnnnnnnnnnnnnnnnnnnnnnnnnnnnnnnnnnnnnnnnnnnnnnnnnnnnnnnnnnnnnnnnnnnnnnnnnnnnnnnnnnnnnnnnnnnnnnnnnnnnnnnnnnnnnnnnnnnnnnnnnnnnnnnnnnnnnnnnnnnnnnnnnnnnnnnnnnnnnnnnnnnnnnnnnnnnnnnnnnnnnnnnnnnnnnnnnnnnnnnnnnnnnnnnnnnnnnnnnnnnnnnnnnnnnnnnnnnnnnnnnnnnnnnnnnnnnnnnnnnnnnnnnnnnnnnnnnnnnnnnnnnnnnnnnnnnnnnnnnnnnnnnnnnnnnnnnnnnnnnnnnnnnnnnnnnnnnnnnnnnnnnnnnnnnnnnnnnnnnnnnnnnnnnnnnnnnnnnnnnnnnnnnnnnnnnnnnnnnnnnnnnnnnnnnnnnnnnnnnnnnnnnnnnnnnnnnnnnnnnnnnnnnnnnnnnnnnnnnnnnnnnnnnnnnnnnnnnnnnnnnnnnnnnnnnnnnnnnnnnnnnnnnnnnnnnnnnnnnnnnnnnnnnnnnnnnnnnnnnnnnnnnnnnnnnnnnnnnnnnnnnnnnnnnnnnnnnnnnnnnnnnnnnnnnnnnnnnnnnnnnnnnnnnnnnnnnnnnnnnnnnnnnnnnnnnnnnnnnnnnnnnnnnnnnnnnnnnnnnnnnnnnnnnnnnnnnnnnnnnnnnnnnnnnnnnnnnnnnnnnnnnnnnnnnnnnnnnnnnnnnnnnnnnnnnnnnnnnnnnnnnnnnnnnnnnnnnnnnnnnnnnnnnnnnnnnnnnnnnnnnnnnnnnnnnnnnnnnnnnnnnnnnnnnnnnnnnnnnnnnnnnnnnnnnnnnnnnnnnnnnnnnnnnnnnnnnnnnnnnnnnnnnnnnnnnnnnnnnnnnnnnnnnnnnnnnnnnnnnnnnnnnnnnnnnnnnnnnnnnnnnnnnnnnnnnnnnnnnnnnnnnnnnnnnnnnnnnnnnnnnnnnnnnnnnnnnnnnnnnnnnnnnnnnnnnnnnnnnnnnnnnnnnnnnnnnnnnnnnnnnnnnnnnnnnnnnnnnnnnnnnnnnnnnnnnnnnnnnnnnnnnnnnnnnnnnnnnnnnnnnnnnnnnnnnnnnnnnnnnnnnnnnnnnnnnnnnnnnnnnnnnnnnnnnnnnnnnnnnnnnnnnnnnnnnnnnnnnnnnnnnnnnnnnnnnnnnnnnnnnnnnnnnnnnnnnnnnnnnnnnnnnnnnnnnnnnnnnnnnnnnnnnnnnnnnnnnnnnnnnnnnnnnnnnnnnnnnnnnnnnnnnnnnnnnnnnnnnnnnnnnnnnnnnnnnnnnnnnnnnnnnnnnnnnnnnnnnnnnnnnnnnnnnnnnnnnnnnnnnnnnnnnnnnnnnnnnnnnnnnnnnnnnnnnnnnnnnnnnnnnnnnnnnnnnnnnnnnnnnnnnnnnnnnnnnnnnnnnnnnnnnnnnnnnnnnnnnnnnnnnnnnnnnnnnnnnnnnnnnnnnnnnnnnnnnnnnnnnnnnnnnnnnnnnnnnnnnnnnnnnnnnnnnnnnnnnnnnnnnnnnnnnnnnnnnnnnnnnnnnnnnnnnnnnnnnnnnnnnnnnnnnnnnnnnnnnnnnnnnnnnnnnnnnnnnnnnnnnnnnnnnnnnnnnnnnnnnnnnnnnnnnnnnnnnnnnnnnnnnnnnnnnnnnnnnnnnnnnnnnnnnnnnnnnnnnnnnnnnnnnnnnnnnnnnnnnnnnnnnnnnnnnnnnnnnnnnnnnnnnnnnnnnnnnnnnnnnnnnnnnnnnnnnnnnnnnnnnnnnnnnnnnnnnnnnnnnnnnnnnnnnnnnnnnnnnnnnnnnnnnnnnnnnnnnnnnnnnnnnnnnnnnnnnnnnnnnnnnnnnnnnnnnnnnnnnnnnnnnnnnnnnnnnnnnnnnnnnnnnnnnnnnnnnnnnnnnnnnnnnnnnnnnnnnnnnnnnnnnnnnnnnnnnnnnnnnnnnnnnnnnnnnnnnnnnnnnnnnnnnnnnnnnnnnnnnnnnnnnnnnnnnnnnnnnnnnnnnnnnnnnnnnnnnnnnnnnnnnnnnnnnnnnnnnnnnnnnnnnnnnnnnnnnnnnnnnnnnnnnnnnnnnnnnnnnnnnnnnnnnnnnnnnnnnnnnnnnnnnnnnnnnnnnnnnnnnnnnnnnnnnnnnnnnnnnnnnnnnnnnnnnnnnnnnnnnnnnnnnnnnnnnnnnnnnnnnnnnnnnnnnnnnnnnnnnnnnnnnnnnnnnnnnnnnnnnnnnnnnnnnnnnnnnnnnnnnnnnnnnnnnnnnnnnnnnnnnnnnnnnnnnnnnnnnnnnnnnnnnnnnnnnnnnnnnnnnnnnnnnnnnnnnnnnnnnnnnnnnnnnnnnnnnnnnnnnnnnnnnnnnnnnnnnnnnnnnnnnnnnnnnnnnnnnnnnnnnnnnnnnnnnnnnnnnnnnnnnnnnnnnnnnnnnnnnnnnnnnnnnnnnnnnnnnnnnnnnnnnnnnnnnnnnnnnnnnnnnnnnnnnnnnnnnnnnnnnnnnnnnnnnnnnnnnnnnnnnnnnnnnnnnnnnnnnnnnnnnnnnnnnnnnnnnnnnnnnnnnnnnnnnnnnnnnnnnnnnnnnnnnnnnnnnnnnnnnnnnnnnnnnnnnnnnnnnnnnnnnnnnnnnnnnnnnnnnnnnnnnnnnnnnnnnnnnnnnnnnnnnnnnnnnnnnnnnnnnnnnnnnnnnnnnnnnnnnnnnnnnnnnnnnnnnnnnnnnnnnnnnnnnnnnnnnnnnnnnnnnnnnnnnnnnnnnnnnnnnnnnnnnnnnnnnnnnnnnnnnnnnnnnnnnnnnnnnnnnnnnnnnnnnnnnnnnnnnnnnnnnnnnnnnnnnnnnnnnnnnnnnnnnnnnnnnnnnnnnnnnnnnnnnnnnnnnnnnnnnnnnnnnnnnnnnnnnnnnnnnnnnnnnnnnnnnnnnnnnnnnnnnnnnnnnnnnnnnnnnnnnnnnnnnnnnnnnnnnnnnnnnnnnnnnnnnnnnnnnnnnnnnnnnnnnnnnnnnnnnnnnnnnnnnnnnnnnnnnnnnnnnnnnnnnnnnnnnnnnnnnnnnnnnnnnnnnnnnnnnnnnnnnnnnnnnnnnnnnnnnnnnnnnnnnnnnnnnnnnnnnnnnnnnnnnnnnnnnnnnnnnnnnnnnnnnnnnnnnnnnnnnnnnnnnnnnnnnnnnnnnnnnnnnnnnnnnnnnnnnnnnnnnnnnnnnnnnnnnnnnnnnnnnnnnnnnnnnnnnnnnnnnnnnnnnnnnnnnnnnnnnnnnnnnnnnnnnnnnnnnnnnnnnnnnnnnnnnnnnnnnnnnnnnnnnnnnnnnnnnnnnnnnnnnnnnnnnnnnnnnnnnnnnnnnnnnnnnnnnnnnnnnnnnnnnnnnnnnnnnnnnnnnnnnnnnnnnnnnnnnnnnnnnnnnnnnnnnnnnnnnnnnnnnnnnnnnnnnnnnnnnnnnnnnnnnnnnnnnnnnnnnnnnnnnnnnnnnnnnnnnnnnnnnnnnnnnnnnnnnnnnnnnnnnnnnnnnnnnnnnnnnnnnnnnnnnnnnnnnnnnnnnnnnnnnnnnnnnnnnnnnnnnnnnnnnnnnnnnnnnnnnnnnnnnnnnnnnnnnnnnnnnnnnnnnnnnnnnnnnnnnnnnnnnnnnnnnnnnnnnnnnnnnnnnnnnnnnnnnnnnnnnnnnnnnnnnnnnnnnnnnnnnnnnnnnnnnnnnnnnnnnnnnnnnnnnnnnnnnnnnnnnnnnnnnnnnnnnnnnnnnnnnnnnnnnnnnnnnnnnnnnnnnnnnnnnnnnnnnnnnnnnnnnnnnnnnnnnnnnnnnnnnnnnnnnnnnnnnnnnnnnnnnnnnnnnnnnnnnnnnnnnnnnnnnnnnnnnnnnnnnnnnnnnnnnnnnnnnnnnnnnnnnnnnnnnnnnnnnnnnnnnnnnnnnnnnnnnnnnnnnnnnnnnnnnnnnnnnnnnnnnnnnnnnnnnnnnnnnnnnnnnnnnnnnnnnnnnnnnnnnnnnnnnnnnnnnnnnnnnnnnnnnnnnnnnnnnnnnnnnnnnnnnnnnnnnnnnnnnnnnnnnnnnnnnnnnnnnnnnnnnnnnnnnnnnnnnnnnnnnnnnnnnnnnnnnnnnnnnnnnnnnnnnnnnnnnnnnnnnnnnnnnnnnnnnnnnnnnnnnnnnnnnnnnnnnnnnnnnnnnnnnnnnnnnnnnnnnnnnnnnnnnnnnnnnnnnnnnnnnnnnnnnnnnnnnnnnnnnnnnnnnnnnnnnnnnnnnnnnnnnnnnnnnnnnnnnnnnnnnnnnnnnnnnnnnnnnnnnnnnnnnnnnnnnnnnnnnnnnnnnnnnnnnnnnnnnnnnnnnnnnnnnnnnnnnnnnnnnnnnnnnnnnnnnnnnnnnnnnnnnnnnnnnnnnnnnnnnnnnnnnnnnnnnnnnnnnnnnnnnnnnnnnnnnnnnnnnnnnnnnnnnnnnnnnnnnnnnnnnnnnnnnnnnnnnnnnnnnnnnnnnnnnnnnnnnnnnnnnnnnnnnnnnnnnnnnnnnnnnnnnnnnnnnnnnnnnnnnnnnnnnnnnnnnnnnnnnnnnnnnnnnnnnnnnnnnnnnnnnnnnnnnnnnnnnnnnnnnnnnnnnnnnnnnnnnnnnnnnnnnnnnnnnnnnnnnnnnnnnnnnnnnnnnnnnnnnnnnnnnnnnnnnnnnnnnnnnnnnnnnnnnnnnnnnnnnnnnnnnnnnnnnnnnnnnnnnnnnnnnnnnnnnnnnnnnnnnnnnnnnnnnnnnnnnnnnnnnnnnnnnnnnnnnnnnnnnnnnnnnnnnnnnnnnnnnnnnnnnnnnnnnnnnnnnnnnnnnnnnnnnnnnnnnnnnnnnnnnnnnnnnnnnnnnnnnnnnnnnnnnnnnnnnnnnnnnnnnnnnnnnnnnnnnnnnnnnnnnnnnnnnnnnnnnnnnnnnnnnnnnnnnnnnnnnnnnnnnnnnnnnnnnnnnnnnnnnnnnnnnnnnnnnnnnnnnnnnnnnnnnnnnnnnnnnnnnnnnnnnnnnnnnnnnnnnnnnnnnnnnnnnnnnnnnnnnnnnnnnnnnnnnnnnnnnnnnnnnnnnnnnnnnnnnnnnnnnnnnnnnnnnnnnnnnnnnnnnnnnnnnnnnnnnnnnnnnnnnnnnnnnnnnnnnnnnnnnnnnnnnnnnnnnnnnnnnnnnnnnnnnnnnnnnnnnnnnnnnnnnnnnnnnnnnnnnnnnnnnnnnnnnnnnnnnnnnnnnnnnnnnnnnnnnnnnnnnnnnnnnnnnnnnnnnnnnnnnnnnnnnnnnnnnnnnnnnnnnnnnnnnnnnnnnnnnnnnnnnnnnnnnnnnnnnnnnnnnnnnnnnnnnnnnnnnnnnnnnnnnnnnnnnnnnnnnnnnnnnnnnnnnnnnnnnnnnnnnnnnnnnnnnnnnnnnnnnnnnnnnnnnnnnnnnnnnnnnnnnnnnnnnnnnnnnnnnnnnnnnnnnnnnnnnnnnnnnnnnnnnnnnnnnnnnnnnnnnnnnnnnnnnnnnnnnnnnnnnnnnnnnnnnnnnnnnnnnnnnnnnnnnnnnnnnnnnnnnnnnnnnnnnnnnnnnnnnnnnnnnnnnnnnnnnnnnnnnnnnnnnnnnnnnnnnnnnnnnnnnnnnnnnnnnnnnnnnnnnnnnnnnnnnnnnnnnnnnnnnnnnnnnnnnnnnnnnnnnnnnnnnnnnnnnnnnnnnnnnnnnnnnnnnnnnnnnnnnnnnnnnnnnnnnnnnnnnnnnnnnnnnnnnnnnnnnnnnnnnnnnnnnnnnnnnnnnnnnnnnnnnnnnnnnnnnnnnnnnnnnnnnnnnnnnnnnnnnnnnnnnnnnnnnnnnnnnnnnnnnnnnnnnnnnnnnnnnnnnnnnnnnnnnnnnnnnnnnnnnnnnnnnnnnnnnnnnnnnnnnnnnnnnnnnnnnnnnnnnnnnnnnnnnnnnnnnnnnnnnnnnnnnnnnnnnnnnnnnnnnnnnnnnnnnnnnnnnnnnnnnnnnnnnnnnnnnnnnnnnnnnnnnnnnnnnnnnnnnnnnnnnnnnnnnnnnnnnnnnnnnnnnnnnnnnnnnnnnnnnnnnnnnnnnnnnnnnnnnnnnnnnnnnnnnnnnnnnnnnnnnnnnnnnnnnnnnnnnnnnnnnnnnnnnnnnnnnnnnnnnnnnnnnnnnnnnnnnnnnnnnnnnnnnnnnnnnnnnnnnnnnnnnnnnnnnnnnnnnnnnnnnnnnnnnnnnnnnnnnnnnnnnnnnnnnnnnnnnnnnnnnnnnnnnnnnnnnnnnnnnnnnnnnnnnnnnnnnnnnnnnnnnnnnnnnnnnnnnnnnnnnnnnnnnnnnnnnnnnnnnnnnnnnnnnnnnnnnnnnnnnnnnnnnnnnnnnnnnnnnnnnnnnnnnnnnnnnnnnnnnnnnnnnnnnnnnnnnnnnnnnnnnnnnnnnnnnnnnnnnnnnnnnnnnnnnnnnnnnnnnnnnnnnnnnnnnnnnnnnnnnnnnnnnnnnnnnnnnnnnnnnnnnnnnnnnnnnnnnnnnnnnnnnnnnnnnnnnnnnnnnnnnnnnnnnnnnnnnnnnnnnnnnnnnnnnnnnnnnnnnnnnnnnnnnnnnnnnnnnnnnnnnnnnnnnnnnnnnnnnnnnnnnnnnnnnnnnnnnnnnnnnnnnnnnnnnnnnnnnnnnnnnnnnnnnnnnnnnnnnnnnnnnnnnnnnnnnnnnnnnnnnnnnnnnnnnnnnnnnnnnnnnnnnnnnnnnnnnnnnnnnnnnnnnnnnnnnnnnnnnnnnnnnnnnnnnnnnnnnnnnnnnnnnnnnnnnnnnnnnnnnnnnnnnnnnnnnnnnnnnnnnnnnnnnnnnnnnnnnnnnnnnnnnnnnnnnnnnnnnnnnnnnnnnnnnnnnnnnnnnnnnnnnnnnnnnnnnnnnnnnnnnnnnnnnnnnnnnnnnnnnnnnnnnnnnnnnnnnnnnnnnnnnnnnnnnnnnnnnnnnnnnnnnnnnnnnnnnnnnnnnnnnnnnnnnnnnnnnnnnnnnnnnnnnnnnnnnnnnnnnnnnnnnnnnnnnnnnnnnnnnnnnnnnnnnnnnnnnnnnnnnnnnnnnnnnnnnnnnnnnnnnnnnnnnnnnnnnnnnnnnnnnnnnnnnnnnnnnnnnnnnnnnnnnnnnnnnnnnnnnnnnnnnnnnnnnnnnnnnnnnnnnnnnnnnnnnnnnnnnnnnnnnnnnnnnnnnnnnnnnnnnnnnnnnnnnnnnnnnnnnnnnnnnnnnnnnnnnnnnnnnnnnnnnnnnnnnnnnnnnnnnnnnnnnnnnnnnnnnnnnnnnnnnnnnnnnnnnnnnnnnnnnnnnnnnnnnnnnnnnnnnnnnnnnnnnnnnnnnnnnnnnnnnnnnnnnnnnnnnnnnnnnnnnnnnnnnnnnnnnnnnnnnnnnnnnnnnnnnnnnnnnnnnnnnnnnnnnnnnnnnnnnnnnnnnnnnnnnnnnnnnnnnnnnnnnnnnnnnnnnnnnnnnnnnnnnnnnnnnnnnnnnnnnnnnnnnnnnnnnnnnnnnnnnnnnnnnnnnnnnnnnnnnnnnnnnnnnnnnnnnnnnnnnnnnnnnnnnnnnnnnnnnnnnnnnnnnnnnnnnnnnnnnnnnnnnnnnnnnnnnnnnnnnnnnnnnnnnnnnnnnnnnnnnnnnnnnnnnnnnnnnnnnnnnnnnnnnnnnnnnnnnnnnnnnnnnnnnnnnnnnnnnnnnnnnnnnnnnnnnnnnnnnnnnnnnnnnnnnnnnnnnnnnnnnnnnnnnnnnnnnnnnnnnnnnnnnnnnnnnnnnnnnnnnnnnnnnnnnnnnnnnnnnnnnnnnnnnnnnnnnnnnnnnnnnnnnnnnnnnnnnnnnnnnnnnnnnnnnnnnnnnnnnnnnnnnnnnnnnnnnnnnnnnnnnnnnnnnnnnnnnnnnnnnnnnnnnnnnnnnnnnnnnnnnnnnnnnnnnnnnnnnnnnnnnnnnnnnnnnnnnnnnnnnnnnnnnnnnnnnnnnnnnnnnnnnnnnnnnnnnnnnnnnnnnnnnnnnnnnnnnnnnnnnnnnnnnnnnnnnnnnnnnnnnnnnnnnnnnnnnnnnnnnnnnnnnnnnnnnnnnnnnnnnnnnnnnnnnnnnnnnnnnnnnnnnnnnnnnnnnnnnnnnnnnnnnnnnnnnnnnnnnnnnnnnnnnnnnnnnnnnnnnnnnnnnnnnnnnnnnnnnnnnnnnnnnnnnnnnnnnnnnnnnnnnnnnnnnnnnnnnnnnnnnnnnnnnnnnnnnnnnnnnnnnnnnnnnnnnnnnnnnnnnnnnnnnnnnnnnnnnnnnnnnnnnnnnnnnnnnnnnnnnnnnnnnnnnnnnnnnnnnnnnnnnnnnnnnnnnnnnnnnnnnnnnnnnnnnnnnnnnnnnnnnnnnnnnnnnnnnnnnnnnnnnnnnnnnnnnnnnnnnnnnnnnnnnnnnnnnnnnnnnnnnnnnnnnnnnnnnnnnnnnnnnnnnnnnnnnnnnnnnnnnnnnnnnnnnnnnnnnnnnnnnnnnnnnnnnnnnnnnnnnnnnnnnnnnnnnnnnnnnnnnnnnnnnnnnnnnnnnnnnnnnnnnnnnnnnnnnnnnnnnnnnnnnnnnnnnnnnnnnnnnnnnnnnnnnnnnnnnnnnnnnnnnnnnnnnnnnnnnnnnnnnnnnnnnnnnnnnnnnnnnnnnnnnnnnnnnnnnnnnnnnnnnnnnnnnnnnnnnnnnnnnnnnnnnnnnnnnnnnnnnnnnnnnnnnnnnnnnnnnnnnnnnnnnnnnnnnnnnnnnnnnnnnnnnnnnnnnnnnnnnnnnnnnnnnnnnnnnnnnnnnnnnnnnnnnnnnnnnnnnnnnnnnnnnnnnnnnnnnnnnnnnnnnnnnnnnnnnnnnnnnnnnnnnnnnnnnnnnnnnnnnnnnnnnnnnnnnnnnnnnnnnnnnnnnnnnnnnnnnnnnnnnnnnnnnnnnnnnnnnnnnnnnnnnnnnnnnnnnnnnnnnnnnnnnnnnnnnnnnnnnnnnnnnnnnnnnnnnnnnnnnnnnnnnnnnnnnnnnnnnnnnnnnnnnnnnnnnnnnnnnnnnnnnnnnnnnnnnnnnnnnnnnnnnnnnnnnnnnnnnnnnnnnnnnnnnnnnnnnnnnnnnnnnnnnnnnnnnnnnnnnnnnnnnnnnnnnnnnnnnnnnnnnnnnnnnnnnnnnnnnnnnnnnnnnnnnnnnnnnnnnnnnnnnnnnnnnnnnnnnnnnnnnnnnnnnnnnnnnnnnnnnnnnnnnnnnnnnnnnnnnnnnnnnnnnnnnnnnnnnnnnnnnnnnnnnnnnnnnnnnnnnnnnnnnnnnnnnnnnnnnnnnnnnnnnnnnnnnnnnnnnnnnnnnnnnnnnnnnnnnnnnnnnnnnnnnnnnnnnnnnnnnnnnnnnnnnnnnnnnnnnnnnnnnnnnnnnnnnnnnnnnnnnnnnnnnnnnnnnnnnnnnnnnnnnnnnnnnnnnnnnnnnnnnnnnnnnnnnnnnnnnnnnnnnnnnnnnnnnnnnnnnnnnnnnnnnnnnnnnnnnnnnnnnnnnnnnnnnnnnnnnnnnnnnnnnnnnnnnnnnnnnnnnnnnnnnnnnnnnnnnnnnnnnnnnnnnnnnnnnnnnnnnnnnnnnnnnnnnnnnnnnnnnnnnnnnnnnnnnnnnnnnnnnnnnnnnnnnnnnnnnnnnnnnnnnnnnnnnnnnnnnnnnnnnnnnnnnnnnnnnnnnnnnnnnnnnnnnnnnnnnnnnnnnnnnnnnnnnnnnnnnnnnnnnnnnnnnnnnnnnnnnnnnnnnnnnnnnnnnnnnnnnnnnnnnnnnnnnnnnnnnnnnnnnnnnnnnnnnnnnnnnnnnnnnnnnnnnnnnnnnnnnnnnnnnnnnnnnnnnnnnnnnnnnnnnnnnnnnnnnnnnnnnnnnnnnnnnnnnnnnnnnnnnnnnnnnnnnnnnnnnnnnnnnnnnnnnnnnnnnnnnnnnnnnnnnnnnnnnnnnnnnnnnnnnnnnnnnnnnnnnnnnnnnnnnnnnnnnnnnnnnnnnnnnnnnnnnnnnnnnnnnnnnnnnnnnnnnnnnnnnnnnnnnnnnnnnnnnnnnnnnnnnnnnnnnnnnnnnnnnnnnnnnnnnnnnnnnnnnnnnnnnnnnnnnnnnnnnnnnnnnnnnnnnnnnnnnnnnnnnnnnnnnnnnnnnnnnnnnnnnnnnnnnnnnnnnnnnnnnnnnnnnnnnnnnnnnnnnnnnnnnnnnnnnnnnnnnnnnnnnnnnnnnnnnnnnnnnnnnnnnnnnnnnnnnnnnnnnnnnnnnnnnnnnnnnnnnnnnnnnnnnnnnnnnnnnnnnnnnnnnnnnnnnnnnnnnnnnnnnnnnnnnnnnnnnnnnnnnnnnnnnnnnnnnnnnnnnnnnnnnnnnnnnnnnnnnnnnnnnnnnnnnnnnnnnnnnnnnnnnnnnnnnnnnnnnnnnnnnnnnnnnnnnnnnnnnnnnnnnnnnnnnnnnnnnnnnnnnnnnnnnnnnnnnnnnnnnnnnnnnnnnnnnnnnnnnnnnnnnnnnnnnnnnnnnnnnnnnnnnnnnnnnnnnnnnnnnnnnnnnnnnnnnnnnnnnnnnnnnnnnnnnnnnnnnnnnnnnnnnnnnnnnnnnnnnnnnnnnnnnnnnnnnnnnnnnnnnnnnnnnnnnnnnnnnnnnnnnnnnnnnnnnnnnnnnnnnnnnnnnnnnnnnnnnnnnnnnnnnnnnnnnnnnnnnnnnnnnnnnnnnnnnnnnnnnnnnnnnnnnnnnnnnnnnnnnnnnnnnnnnnnnnnnnnnnnnnnnnnnnnnnnnnnnnnnnnnnnnnnnnnnnnnnnnnnnnnnnnnnnnnnnnnnnnnnnnnnnnnnnnnnnnnnnnnnnnnnnnnnnnnnnnnnnnnnnnnnnnnnnnnnnnnnnnnnnnnnnnnnnnnnnnnnnnnnnnnnnnnnnnnnnnnnnnnnnnnnnnnnnnnnnnnnnnnnnnnnnnnnnnnnnnnnnnnnnnnnnnnnnnnnnnnnnnnnnnnnnnnnnnnnnnnnnnnnnnnnnnnnnnnnnnnnnnnnnnnnnnnnnnnnnnnnnnnnnnnnnnnnnnnnnnnnnnnnnnnnnnnnnnnnnnnnnnnnnnnnnnnnnnnnnnnnnnnnnnnnnnnnnnnnnnnnnnnnnnnnnnnnnnnnnnnnnnnnnnnnnnnnnnnnnnnnnnnnnnnnnnnnnnnnnnnnnnnnnnnnnnnnnnnnnnnnnnnnnnnnnnnnnnnnnnnnnnnnnnnnnnnnnnnnnnnnnnnnnnnnnnnnnnnnnnnnnnnnnnnnnnnnnnnnnnnnnnnnnnnnnnnnnnnnnnnnnnnnnnnnnnnnnnnnnnnnnnnnnnnnnnnnnnnnnnnnnnnnnnnnnnnnnnnnnnnnnnnnnnnnnnnnnnnnnnnnnnnnnnnnnnnnnnnnnnnnnnnnnnnnnnnnnnnnnnnnnnnnnnnnnnnnnnnnnnnnnnnnnnnnnnnnnnnnnnnnnnnnnnnnnnnnnnnnnnnnnnnnnnnnnnnnnnnnnnnnnnnnnnnnnnnnnnnnnnnnnnnnnnnnnnnnnnnnnnnnnnnnnnnnnnnnnnnnnnnnnnnnnnnnnnnnnnnnnnnnnnnnnnnnnnnnnnnnnnnnnnnnnnnnnnnnnnnnnnnnnnnnnnnnnnnnnnnnnnnnnnnnnnnnnnnnnnnnnnnnnnnnnnnnnnnnnnnnnnnnnnnnnnnnnnnnnnnnnnnnnnnnnnnnnnnnnnnnnnnnnnnnnnnnnnnnnnnnnnnnnnnnnnnnnnnnnnnnnnnnnnnnnnnnnnnnnnnnnnnnnnnnnnnnnnnnnnnnnnnnnnnnnnnnnnnnnnnnnnnnnnnnnnnnnnnnnnnnnnnnnnnnnnnnnnnnnnnnnnnnnnnnnnnnnnnnnnnnnnnnnnnnnnnnnnnnnnnnnnnnnnnnnnnnnnnnnnnnnnnnnnnnnnnnnnnnnnnnnnnnnnnnnnnnnnnnnnnnnnnnnnnnnnnnnnnnnnnnnnnnnnnnnnnnnnnnnnnnnnnnnnnnnnnnnnnnnnnnnnnnnnnnnnnnnnnnnnnnnnnnnnnnnnnnnnnnnnnnnnnnnnnnnnnnnnnnnnnnnnnnnnnnnnnnnnnnnnnnnnnnnnnnnnnnnnnnnnnnnnnnnnnnnnnnnnnnnnnnnnnnnnnnnnnnnnnnnnnnnnnnnnnnnnnnnnnnnnnnnnnnnnnnnnnnnnnnnnnnnnnnnnnnnnnnnnnnnnnnnnnnnnnnnnnnnnnnnnnnnnnnnnnnnnnnnnnnnnnnnnnnnnnnnnnnnnnnnnnnnnnnnnnnnnnnnnnnnnnnnnnnnnnnnnnnnnnnnnnnnnnnnnnnnnnnnnnnnnnnnnnnnnnnnnnnnnnnnnnnnnnnnnnnnnnnnnnnnnnnnnnnnnnnnnnnnnnnnnnnnnnnnnnnnnnnnnnnnnnnnnnnnnnnnnnnnnnnnnnnnnnnnnnnnnnnnnnnnnnnnnnnnnnnnnnnnnnnnnnnnnnnnnnnnnnnnnnnnnnnnnnnnnnnnnnnnnnnnnnnnnnnnnnnnnnnnnnnnnnnnnnnnnnnnnnnnnnnnnnnnnnnnnnnnnnnnnnnnnnnnnnnnnnnnnnnnnnnnnnnnnnnnnnnnnnnnnnnnnnnnnnnnnnnnnnnnnnnnnnnnnnnnnnnnnnnnnnnnnnnnnnnnnnnnnnnnnnnnnnnnnnnnnnnnnnnnnnnnnnnnnnnnnnnnnnnnnnnnnnnnnnnnnnnnnnnnnnnnnnnnnnnnnnnnnnnnnnnnnnnnnnnnnnnnnnnnnnnnnnnnnnnnnnnnnnnnnnnnnnnnnnnnnnnnnnnnnnnnnnnnnnnnnnnnnnnnnnnnnnnnnnnnnnnnnnnnnnnnnnnnnnnnnnnnnnnnnnnnnnnnnnnnnnnnnnnnnnnnnnnnnnnnnnnnnnnnnnnnnnnnnnnnnnnnnnnnnnnnnnnnnnnnnnnnnnnnnnnnnnnnnnnnnnnnnnnnnnnnnnnnnnnnnnnnnnnnnnnnnnnnnnnnnnnnnnnnnnnnnnnnnnnnnnnnnnnnnnnnnnnnnnnnnnnnnnnnnnnnnnnnnnnnnnnnnnnnnnnnnnnnnnnnnnnnnnnnnnnnnnnnnnnnnnnnnnnnnnnnnnnnnnnnnnnnnnnnnnnnnnnnnnnnnnnnnnnnnnnnnnnnnnnnnnnnnnnnnnnnnnnnnnnnnnnnnnnnnnnnnnnnnnnnnnnnnnnnnnnnnnnnnnnnnnnnnnnnnnnnnnnnnnnnnnnnnnnnnnnnnnnnnnnnnnnnnnnnnnnnnnnnnnnnnnnnnnnnnnnnnnnnnnnnnnnnnnnnnnnnnnnnnnnnnnnnnnnnnnnnnnnnnnnnnnnnnnnnnnnnnnnnnnnnnnnnnnnnnnnnnnnnnnnnnnnnnnnnnnnnnnnnnnnnnnnnnnnnnnnnnnnnnnnnnnnnnnnnnnnnnnnnnnnnnnnnnnnnnnnnnnnnnnnnnnnnnnnnnnnnnnnnnnnnnnnnnnnnnnnnnnnnnnnnnnnnnnnnnnnnnnnnnnnnnnnnnnnnnnnnnnnnnnnnnnnnnnnnnnnnnnnnnnnnnnnnnnnnnnnnnnnnnnnnnnnnnnnnnnnnnnnnnnnnnnnnnnnnnnnnnnnnnnnnnnnnnnnnnnnnnnnnnnnnnnnnnnnnnnnnnnnnnnnnnnnnnnnnnnnnnnnnnnnnnnnnnnnnnnnnnnnnnnnnnnnnnnnnnnnnnnnnnnnnnnnnnnnnnnnnnnnnnnnnnnnnnnnnnnnnnnnnnnnnnnnnnnnnnnnnnnnnnnnnnnnnnnnnnnnnnnnnnnnnnnnnnnnnnnnnnnnnnnnnnnnnnnnnnnnnnnnnnnnnnnnnnnnnnnnnnnnnnnnnnnnnnnnnnnnnnnnnnnnnnnnnnnnnnnnnnnnnnnnnnnnnnnnnnnnnnnnnnnnnnnnnnnnnnnnnnnnnnnnnnnnnnnnnnnnnnnnnnnnnnnnnnnnnnnnnnnnnnnnnnnnnnnnnnnnnnnnnnnnnnnnnnnnnnnnnnnnnnnnnnnnnnnnnnnnnnnnnnnnnnnnnnnnnnnnnnnnnnnnnnnnnnnnnnnnnnnnnnnnnnnnnnnnnnnnnnnnnnnnnnnnnnnnnnnnnnnnnnnnnnnnnnnnnnnnnnnnnnnnnnnnnnnnnnnnnnnnnnnnnnnnnnnnnnnnnnnnnnnnnnnnnnnnnnnnnnnnnnnnnnnnnnnnnnnnnnnnnnnnnnnnnnnnnnnnnnnnnnnnnnnnnnnnnnnnnnnnnnnnnnnnnnnnnnnnnnnnnnnnnnnnnnnnnnnnnnnnnnnnnnnnnnnnnnnnnnnnnnnnnnnnnnnnnnnnnnnnnnnnnnnnnnnnnnnnnnnnnnnnnnnnnnnnnnnnnnnnnnnnnnnnnnnnnnnnnnnnnnnnnnnnnnnnnnnnnnnnnnnnnnnnnnnnnnnnnnnnnnnnnnnnnnnnnnnnnnnnnnnnnnnnnnnnnnnnnnnnnnnnnnnnnnnnnnnnnnnnnnnnnnnnnnnnnnnnnnnnnnnnnnnnnnnnnnnnnnnnnnnnnnnnnnnnnnnnnnnnnnnnnnnnnnnnnnnnnnnnnnnnnnnnnnnnnnnnnnnnnnnnnnnnnnnnnnnnnnnnnnnnnnnnnnnnnnnnnnnnnnnnnnnnnnnnnnnnnnnnnnnnnnnnnnnnnnnnnnnnnnnnnnnnnnnnnnnnnnnnnnnnnnnnnnnnnnnnnnnnnnnnnnnnnnnnnnnnnnnnnnnnnnnnnnnnnnnnnnnnnnnnnnnnnnnnnnnnnnnnnnnnnnnnnnnnnnnnnnnnnnnnnnnnnnnnnnnnnnnnnnnnnnnnnnnnnnnnnnnnnnnnnnnnnnnnnnnnnnnnnnnnnnnnnnnnnnnnnnnnnnnnnnnnnnnnnnnnnnnnnnnnnnnnnnnnnnnnnnnnnnnnnnnnnnnnnnnnnnnnnnnnnnnnnnnnnnnnnnnnnnnnnnnnnnnnnnnnnnnnnnnnnnnnnnnnnnnnnnnnnnnnnnnnnnnnnnnnnnnnnnnnnnnnnnnnnnnnnnnnnnnnnnnnnnnnnnnnnnnnnnnnnnnnnnnnnnnnnnnnnnnnnnnnnnnnnnnnnnnnnnnnnnnnnnnnnnnnnnnnnnnnnnnnnnnnnnnnnnnnnnnnnnnnnnnnnnnnnnnnnnnnnnnnnnnnnnnnnnnnnnnnnnnnnnnnnnnnnnnnnnnnnnnnnnnnnnnnnnnnnnnnnnnnnnnnnnnnnnnnnnnnnnnnnnnnnnnnnnnnnnnnnnnnnnnnnnnnnnnnnnnnnnnnnnnnnnnnnnnnnnnnnnnnnnnnnnnnnnnnnnnnnnnnnnnnnnnnnnnnnnnnnnnnnnnnnnnnnnnnnnnnnnnnnnnnnnnnnnnnnnnnnnnnnnnnnnnnnnnnnnnnnnnnnnnnnnnnnnnnnnnnnnnnnnnnnnnnnnnnnnnnnnnnnnnnnnnnnnnnnnnnnnnnnnnnnnnnnnnnnnnnnnnnnnnnnnnnnnnnnnnnnnnnnnnnnnnnnnnnnnnnnnnnnnnnnnnnnnnnnnnnnnnnnnnnnnnnnnnnnnnnnnnnnnnnnnnnnnnnnnnnnnnnnnnnnnnnnnnnnnnnnnnnnnnnnnnnnnnnnnnnnnnnnnnnnnnnnnnnnnnnnnnnnnnnnnnnnnnnnnnnnnnnnnnnnnnnnnnnnnnnnnnnnnnnnnnnnnnnnnnnnnnnnnnnnnnnnnnnnnnnnnnnnnnnnnnnnnnnnnnnnnnnnnnnnnnnnnnnnnnnnnnnnnnnnnnnnnnnnnnnnnnnnnnnnnnnnnnnnnnnnnnnnnnnnnnnnnnnnnnnnnnnnnnnnnnnnnnnnnnnnnnnnnnnnnnnnnnnnnnnnnnnnnnnnnnnnnnnnnnnnnnnnnnnnnnnnnnnnnnnnnnnnnnnnnnnnnnnnnnnnnnnnnnnnnnnnnnnnnnnnnnnnnnnnnnnnnnnnnnnnnnnnnnnnnnnnnnnnnnnnnnnnnnnnnnnnnnnnnnnnnnnnnnnnnnnnnnnnnnnnnnnnnnnnnnnnnnnnnnnnnnnnnnnnnnnnnnnnnnnnnnnnnnnnnnnnnnnnnnnnnnnnnnnnnnnnnnnnnnnnnnnnnnnnnnnnnnnnnnnnnnnnnnnnnnnnnnnnnnnnnnnnnnnnnnnnnnnnnnnnnnnnnnnnnnnnnnnnnnnnnnnnnnnnnnnnnnnnnnnnnnnnnnnnnnnnnnnnnnnnnnnnnnnnnnnnnnnnnnnnnnnnnnnnnnnnnnnnnnnnnnnnnnnnnnnnnnnnnnnnnnnnnnnnnnnnnnnnnnnnnnnnnnnnnnnnnnnnnnnnnnnnnnnnnnnnnnnnnnnnnnnnnnnnnnnnnnnnnnnnnnnnnnnnnnnnnnnnnnnnnnnnnnnnnnnnnnnnnnnnnnnnnnnnnnnnnnnnnnnnnnnnnnnnnnnnnnnnnnnnnnnnnnnnnnnnnnnnnnnnnnnnnnnnnnnnnnnnnnnnnnnnnnnnnnnnnnnnnnnnnnnnnnnnnnnnnnnnnnnnnnnnnnnnnnnnnnnnnnnnnnnnnnnnnnnnnnnnnnnnnnnnnnnnnnnnnnnnnnnnnnnnnnnnnnnnnnnnnnnnnnnnnnnnnnnnnnnnnnnnnnnnnnnnnnnnnnnnnnnnnnnnnnnnnnnnnnnnnnnnnnnnnnnnnnnnnnnnnnnnnnnnnnnnnnnnnnnnnnnnnnnnnnnnnnnnnnnnnnnnnnnnnnnnnnnnnnnnnnnnnnnnnnnnnnnnnnnnnnnnnnnnnnnnnnnnnnnnnnnnnnnnnnnnnnnnnnnnnnnnnnnnnnnnnnnnnnnnnnnnnnnnnnnnnnnnnnnnnnnnnnnnnnnnnnnnnnnnnnnnnnnnnnnnnnnnnnnnnnnnnnnnnnnnnnnnnnnnnnnnnnnnnnnnnnnnnnnnnnnnnnnnnnnnnnnnnnnnnnnnnnnnnnnnnnnnnnnnnnnnnnnnnnnnnnnnnnnnnnnnnnnnnnnnnnnnnnnnnnnnnnnnnnnnnnnnnnnnnnnnnnnnnnnnnnnnnnnnnnnnnnnnnnnnnnnnnnnnnnnnnnnnnnnnnnnnnnnnnnnnnnnnnnnnnnnnnnnnnnnnnnnnnnnnnnnnnnnnnnnnnnnnnnnnnnnnnnnnnnnnnnnnnnnnnnnnnnnnnnnnnnnnnnnnnnnnnnnnnnnnnnnnnnnnnnnnnnnnnnnnnnnnnnnnnnnnnnnnnnnnnnnnnnnnnnnnnnnnnnnnnnnnnnnnnnnnnnnnnnnnnnnnnnnnnnnnnnnnnnnnnnnnnnnnnnnnnnnnnnnnnnnnnnnnnnnnnnnnnnnnnnnnnnnnnnnnnnnnnnnnnnnnnnnnnnnnnnnnnnnnnnnnnnnnnnnnnnnnnnnnnnnnnnnnnnnnnnnnnnnnnnnnnnnnnnnnnnnnnnnnnnnnnnnnnnnnnnnnnnnnnnnnnnnnnnnnnnnnnnnnnnnnnnnnnnnnnnnnnnnnnnnnnnnnnnnnnnnnnnnnnnnnnnnnnnnnnnnnnnnnnnnnnnnnnnnnnnnnnnnnnnnnnnnnnnnnnnnnnnnnnnnnnnnnnnnnnnnnnnnnnnnnnnnnnnnnnnnnnnnnnnnnnnnnnnnnnnnnnnnnnnnnnnnnnnnnnnnnnnnnnnnnnnnnnnnnnnnnnnnnnnnnnnnnnnnnnnnnnnnnnnnnnnnnnnnnnnnnnnnnnnnnnnnnnnnnnnnnnnnnnnnnnnnnnnnnnnnnnnnnnnnnnnnnnnnnnnnnnnnnnnnnnnnnnnnnnnnnnnnnnnnnnnnnnnnnnnnnnnnnnnnnnnnnnnnnnnnnnnnnnnnnnnnnnnnnnnnnnnnnnnnnnnnnnnnnnnnnnnnnnnnnnnnnnnnnnnnnnnnnnnnnnnnnnnnnnnnnnnnnnnnnnnnnnnnnnnnnnnnnnnnnnnnnnnnnnnnnnnnnnnnnnnnnnnnnnnnnnnnnnnnnnnnnnnnnnnnnnnnnnnnnnnnnnnnnnnnnnnnnnnnnnnnnnnnnnnnnnnnnnnnnnnnnnnnnnnnnnnnnnnnnnnnnnnnnnnnnnnnnnnnnnnnnnnnnnnnnnnnnnnnnnnnnnnnnnnnnnnnnnnnnnnnnnnnnnnnnnnnnnnnnnnnnnnnnnnnnnnnnnnnnnnnnnnnnnnnnnnnnnnnnnnnnnnnnnnnnnnnnnnnnnnnnnnnnnnnnnnnnnnnnnnnnnnnnnnnnnnnnnnnnnnnnnnnnnnnnnnnnnnnnnnnnnnnnnnnnnnnnnnnnnnnnnnnnnnnnnnnnnnnnnnnnnnnnnnnnnnnnnnnnnnnnnnnnnnnnnnnnnnnnnnnnnnnnnnnnnnnnnnnnnnnnnnnnnnnnnnnnnnnnnnnnnnnnnnnnnnnnnnnnnnnnnnnnnnnnnnnnnnnnnnnnnnnnnnnnnnnnnnnnnnnnnnnnnnnnnnnnnnnnnnnnnnnnnnnnnnnnnnnnnnnnnnnnnnnnnnnnnnnnnnnnnnnnnnnnnnnnnnnnnnnnnnnnnnnnnnnnnnnnnnnnnnnnnnnnnnnnnnnnnnnnnnnnnnnnnnnnnnnnnnnnnnnnnnnnnnnnnnnnnnnnnnnnnnnnnnnnnnnnnnnnnnnnnnnnnnnnnnnnnnnnnnnnnnnnnnnnnnnnnnnnnnnnnnnnnnnnnnnnnnnnnnnnnnnnnnnnnnnnnnnnnnnnnnnnnnnnnnnnnnnnnnnnnnnnnnnnnnnnnnnnnnnnnnnnnnnnnnnnnnnnnnnnnnnnnnnnnnnnnnnnnnnnnnnnnnnnnnnnnnnnnnnnnnnnnnnnnnnnnnnnnnnnnnnnnnnnnnnnnnnnnnnnnnnnnnnnnnnnnnnnnnnnnnnnnnnnnnnnnnnnnnnnnnnnnnnnnnnnnnnnnnnnnnnnnnnnnnnnnnnnnnnnnnnnnnnnnnnnnnnnnnnnnnnnnnnnnnnnnnnnnnnnnnnnnnnnnnnnnnnnnnnnnnnnnnnnnnnnnnnnnnnnnnnnnnnnnnnnnnnnnnnnnnnnnnnnnnnnnnnnnnnnnnnnnnnnnnnnnnnnnnnnnnnnnnnnnnnnnnnnnnnnnnnnnnnnnnnnnnnnnnnnnnnnnnnnnnnnnnnnnnnnnnnnnnnnnnnnnnnnnnnnnnnnnnnnnnnnnnnnnnnnnnnnnnnnnnnnnnnnnnnnnnnnnnnnnnnnnnnnnnnnnnnnnnnnnnnnnnnnnnnnnnnnnnnnnnnnnnnnnnnnnnnnnnnnnnnnnnnnnnnnnnnnnnnnnnnnnnnnnnnnnnnnnnnnnnnnnnnnnnnnnnnnnnnnnnnnnnnnnnnnnnnnnnnnnnnnnnnnnnnnnnnnnnnnnnnnnnnnnnnnnnnnnnnnnnnnnnnnnnnnnnnnnnnnnnnnnnnnnnnnnnnnnnnnnnnnnnnnnnnnnnnnnnnnnnnnnnnnnnnnnnnnnnnnnnnnnnnnnnnnnnnnnnnnnnnnnnnnnnnnnnnnnnnnnnnnnnnnnnnnnnnnnnnnnnnnnnnnnnnnnnnnnnnnnnnnnnnnnnnnnnnnnnnnnnnnnnnnnnnnnnnnnnnnnnnnnnnnnnnnnnnnnnnnnnnnnnnnnnnnnnnnnnnnnnnnnnnnnnnnnnnnnnnnnnnnnnnnnnnnnnnnnnnnnnnnnnnnnnnnnnnnnnnnnnnnnnnnnnnnnnnnnnnnnnnnnnnnnnnnnnnnnnnnnnnnnnnnnnnnnnnnnnnnnnnnnnnnnnnnnnnnnnnnnnnnnnnnnnnnnnnnnnnnnnnnnnnnnnnnnnnnnnnnnnnnnnnnnnnnnnnnnnnnnnnnnnnnnnnnnnnnnnnnnnnnnnnnnnnnnnnnnnnnnnnnnnnnnnnnnnnnnnnnnnnnnnnnnnnnnnnnnnnnnnnnnnnnnnnnnnnnnnnnnnnnnnnnnnnnnnnnnnnnnnnnnnnnnnnnnnnnnnnnnnnnnnnnnnnnnnnnnnnnnnnnnnnnnnnnnnnnnnnnnnnnnnnnnnnnnnnnnnnnnnnnnnnnnnnnnnnnnnnnnnnnnnnnnnnnnnnnnnnnnnnnnnnnnnnnnnnnnnnnnnnnnnnnnnnnnnnnnnnnnnnnnnnnnnnnnnnnnnnnnnnnnnnnnnnnnnnnnnnnnnnnnnnnnnnnnnnnnnnnnnnnnnnnnnnnnnnnnnnnnnnnnnnnnnnnnnnnnnnnnnnnnnnnnnnnnnnnnnnnnnnnnnnnnnnnnnnnnnnnnnnnnnnnnnnnnnnnnnnnnnnnnnnnnnnnnnnnnnnnnnnnnnnnnnnnnnnnnnnnnnnnnnnnnnnnnnnnnnnnnnnnnnnnnnnnnnnnnnnnnnnnnnnnnnnnnnnnnnnnnnnnnnnnnnnnnnnnnnnnnnnnnnnnnnnnnnnnnnnnnnnnnnnnnnnnnnnnnnnnnnnnnnnnnnnnnnnnnnnnnnnnnnnnnnnnnnnnnnnnnnnnnnnnnnnnnnnnnnnnnnnnnnnnnnnnnnnnnnnnnnnnnnnnnnnnnnnnnnnnnnnnnnnnnnnnnnnnnnnnnnnnnnnnnnnnnnnnnnnnnnnnnnnnnnnnnnnnnnnnnnnnnnnnnnnnnnnnnnnnnnnnnnnnnnnnnnnnnnnnnnnnnnnnnnnnnnnnnnnnnnnnnnnnnnnnnnnnnnnnnnnnnnnnnnnnnnnnnnnnnnnnnnnnnnnnnnnnnnnnnnnnnnnnnnnnnnnnnnnnnnnnnnnnnnnnnnnnnnnnnnnnnnnnnnnnnnnnnnnnnnnnnnnnnnnnnnnnnnnnnnnnnnnnnnnnnnnnnnnnnnnnnnnnnnnnnnnnnnnnnnnnnnnnnnnnnnnnnnnnnnnnnnnnnnnnnnnnnnnnnnnnnnnnnnnnnnnnnnnnnnnnnnnnnnnnnnnnnnnnnnnnnnnnnnnnnnnnnnnnnnnnnnnnnnnnnnnnnnnnnnnnnnnnnnnnnnnnnnnnnnnnnnnnnnnnnnnnnnnnnnnnnnnnnnnnnnnnnnnnnnnnnnnnnnnnnnnnnnnnnnnnnnnnnnnnnnnnnnnnnnnnnnnnnnnnnnnnnnnnnnnnnnnnnnnnnnnnnnnnnnnnnnnnnnnnnnnnnnnnnnnnnnnnnnnnnnnnnnnnnnnnnnnnnnnnnnnnnnnnnnnnnnnnnnnnnnnnnnnnnnnnnnnnnnnnnnnnnnnnnnnnnnnnnnnnnnnnnnnnnnnnnnnnnnnnnnnnnnnnnnnnnnnnnnnnnnnnnnnnnnnnnnnnnnnnnnnnnnnnnnnnnnnnnnnnnnnnnnnnnnnnnnnnnnnnnnnnnnnnnnnnnnnnnnnnnnnnnnnnnnnnnnnnnnnnnnnnnnnnnnnnnnnnnnnnnnnnnnnnnnnnnnnnnnnnnnnnnnnnnnnnnnnnnnnnnnnnnnnnnnnnnnnnnnnnnnnnnnnnnnnnnnnnnnnnnnnnnnnnnnnnnnnnnnnnnnnnnnnnnnnnnnnnnnnnnnnnnnnnnnnnnnnnnnnnnnnnnnnnnnnnnnnnnnnnnnnnnnnnnnnnnnnnnnnnnnnnnnnnnnnnnnnnnnnnnnnnnnnnnnnnnnnnnnnnnnnnnnnnnnnnnnnnnnnnnnnnnnnnnnnnnnnnnnnnnnnnnnnnnnnnnnnnnnnnnnnnnnnnnnnnnnnnnnnnnnnnnnnnnnnnnnnnnnnnnnnnnnnnnnnnnnnnnnnnnnnnnnnnnnnnnnnnnnnnnnnnnnnnnnnnnnnnnnnnnnnnnnnnnnnnnnnnnnnnnnnnnnnnnnnnnnnnnnnnnnnnnnnnnnnnnnnnnnnnnnnnnnnnnnnnnnnnnnnnnnnnnnnnnnnnnnnnnnnnnnnnnnnnnnnnnnnnnnnnnnnnnnnnnnnnnnnnnnnnnnnnnnnnnnnnnnnnnnnnnnnnnnnnnnnnnnnnnnnnnnnnnnnnnnnnnnnnnnnnnnnnnnnnnnnnnnnnnnnnnnnnnnnnnnnnnnnnnnnnnnnnnnnnnnnnnnnnnnnnnnnnnnnnnnnnnnnnnnnnnnnnnnnnnnnnnnnnnnnnnnnnnnnnnnnnnnnnnnnnnnnnnnnnnnnnnnnnnnnnnnnnnnnnnnnnnnnnnnnnnnnnnnnnnnnnnnnnnnnnnnnnnnnnnnnnnnnnnnnnnnnnnnnnnnnnnnnnnnnnnnnnnnnnnnnnnnnnnnnnnnnnnnnnnnnnnnnnnnnnnnnnnnnnnnnnnnnnnnnnnnnnnnnnnnnnnnnnnnnnnnnnnnnnnnnnnnnnnnnnnnnnnnnnnnnnnnnnnnnnnnnnnnnnnnnnnnnnnnnnnnnnnnnnnnnnnnnnnnnnnnnnnnnnnnnnnnnnnnnnnnnnnnnnnnnnnnnnnnnnnnnnnnnnnnnnnnnnnnnnnnnnnnnnnnnnnnnnnnnnnnnnnnnnnnnnnnnnnnnnnnnnnnnnnnnnnnnnnnnnnnnnnnnnnnnnnnnnnnnnnnnnnnnnnnnnnnnnnnnnnnnnnnnnnnnnnnnnnnnnnnnnnnnnnnnnnnnnnnnnnnnnnnnnnnnnnnnnnnnnnnnnnnnnnnnnnnnnnnnnnnnnnnnnnnnnnnnnnnnnnnnnnnnnnnnnnnnnnnnnnnnnnnnnnnnnnnnnnnnnnnnnnnnnnnnnnnnnnnnnnnnnnnnnnnnnnnnnnnnnnnnnnnnnnnnnnnnnnnnnnnnnnnnnnnnnnnnnnnnnnnnnnnnnnnnnnnnnnnnnnnnnnnnnnnnnnnnnnnnnnnnnnnnnnnnnnnnnnnnnnnnnnnnnnnnnnnnnnnnnnnnnnnnnnnnnnnnnnnnnnnnnnnnnnnnnnnnnnnnnnnnnnnnnnnnnnnnnnnnnnnnnnnnnnnnnnnnnnnnnnnnnnnnnnnnnnnnnnnnnnnnnnnnnnnnnnnnnnnnnnnnnnnnnnnnnnnnnnnnnnnnnnnnnnnnnnnnnnnnnnnnnnnnnnnnnnnnnnnnnnnnnnnnnnnnnnnnnnnnnnnnnnnnnnnnnnnnnnnnnnnnnnnnnnnnnnnnnnnnnnnnnnnnnnnnnnnnnnnnnnnnnnnnnnnnnnnnnnnnnnnnnnnnnnnnnnnnnnnnnnnnnnnnnnnnnnnnnnnnnnnnnnnnnnnnnnnnnnnnnnnnnnnnnnnnnnnnnnnnnnnnnnnnnnnnnnnnnnnnnnnnnnnnnnnnnnnnnnnnnnnnnnnnnnnnnnnnnnnnnnnnnnnnnnnnnnnnnnnnnnnnnnnnnnnnnnnnnnnnnnnnnnnnnnnnnnnnnnnnnnnnnnnnnnnnnnnnnnnnnnnnnnnnnnnnnnnnnnnnnnnnnnnnnnnnnnnnnnnnnnnnnnnnnnnnnnnnnnnnnnnnnnnnnnnnnnnnnnnnnnnnnnnnnnnnnnnnnnnnnnnnnnnnnnnnnnnnnnnnnnnnnnnnnnnnnnnnnnnnnnnnnnnnnnnnnnnnnnnnnnnnnnnnnnnnnnnnnnnnnnnnnnnnnnnnnnnnnnnnnnnnnnnnnnnnnnnnnnnnnnnnnnnnnnnnnnnnnnnnnnnnnnnnnnnnnnnnnnnnnnnnnnnnnnnnnnnnnnnnnnnnnnnnnnnnnnnnnnnnnnnnnnnnnnnnnnnnnnnnnnnnnnnnnnnnnnnnnnnnnnnnnnnnnnnnnnnnnnnnnnnnnnnnnnnnnnnnnnnnnnnnnnnnnnnnnnnnnnnnnnnnnnnnnnnnnnnnnnnnnnnnnnnnnnnnnnnnnnnnnnnnnnnnnnnnnnnnnnnnnnnnnnnnnnnnnnnnnnnnnnnnnnnnnnnnnnnnnnnnnnnnnnnnnnnnnnnnnnnnnnnnnnnnnnnnnnnnnnnnnnnnnnnnnnnnnnnnnnnnnnnnnnnnnnnnnnnnnnnnnnnnnnnnnnnnnnnnnnnnnnnnnnnnnnnnnnnnnnnnnnnnnnnnnnnnnnnnnnnnnnnnnnnnnnnnnnnnnnnnnnnnnnnnnnnnnnnnnnnnnnnnnnnnnnnnnnnnnnnnnnnnnnnnnnnnnnnnnnnnnnnnnnnnnnnnnnnnnnnnnnnnnnnnnnnnnnnnnnnnnnnnnnnnnnnnnnnnnnnnnnnnnnnnnnnnnnnnnnnnnnnnnnnnnnnnnnnnnnnnnnnnnnnnnnnnnnnnnnnnnnnnnnnnnnnnnnnnnnnnnnnnnnnnnnnnnnnnnnnnnnnnnnnnnnnnnnnnnnnnnnnnnnnnnnnnnnnnnnnnnnnnnnnnnnnnnnnnnnnnnnnnnnnnnnnnnnnnnnnnnnnnnnnnnnnnnnnnnnnnnnnnnnnnnnnnnnnnnnnnnnnnnnnnnnnnnnnnnnnnnnnnnnnnnnnnnnnnnnnnnnnnnnnnnnnnnnnnnnnnnnnnnnnnnnnnnnnnnnnnnnnnnnnnnnnnnnnnnnnnnnnnnnnnnnnnnnnnnnnnnnnnnnnnnnnnnnnnnnnnnnnnnnnnnnnnnnnnnnnnnnnnnnnnnnnnnnnnnnnnnnnnnnnnnnnnnnnnnnnnnnnnnnnnnnnnnnnnnnnnnnnnnnnnnnnnnnnnnnnnnnnnnnnnnnnnnnnnnnnnnnnnnnnnnnnnnnnnnnnnnnnnnnnnnnnnnnnnnnnnnnnnnnnnnnnnnnnnnnnnnnnnnnnnnnnnnnnnnnnnnnnnnnnnnnnnnnnnnnnnnnnnnnnnnnnnnnnnnnnnnnnnnnnnnnnnnnnnnnnnnnnnnnnnnnnnnnnnnnnnnnnnnnnnnnnnnnnnnnnnnnnnnnnnnnnnnnnnnnnnnnnnnnnnnnnnnnnnnnnnnnnnnnnnnnnnnnnnnnnnnnnnnnnnnnnnnnnnnnnnnnnnnnnnnnnnnnnnnnnnnnnnnnnnnnnnnnnnnnnnnnnnnnnnnnnnnnnnnnnnnnnnnnnnnnnnnnnnnnnnnnnnnnnnnnnnnnnnnnnnnnnnnnnnnnnnnnnnnnnnnnnnnnnnnnnnnnnnnnnnnnnnnnnnnnnnnnnnnnnnnnnnnnnnnnnnnnnnnnnnnnnnnnnnnnnnnnnnnnnnnnnnnnnnnnnnnnnnnnnnnnnnnnnnnnnnnnnnnnnnnnnnnnnnnnnnnnnnnnnnnnnnnnnnnnnnnnnnnnnnnnnnnnnnnnnnnnnnnnnnnnnnnnnnnnnnnnnnnnnnnnnnnnnnnnnnnnnnnnnnnnnnnnnnnnnnnnnnnnnnnnnnnnnnnnnnnnnnnnnnnnnnnnnnnnnnnnnnnnnnnnnnnnnnnnnnnnnnnnnnnnnnnnnnnnnnnnnnnnnnnnnnnnnnnnnnnnnnnnnnnnnnnnnnnnnnnnnnnnnnnnnnnnnnnnnnnnnnnnnnnnnnnnnnnnnnnnnnnnnnnnnnnnnnnnnnnnnnnnnnnnnnnnnnnnnnnnnnnnnnnnnnnnnnnnnnnnnnnnnnnnnnnnnnnnnnnnnnnnnnnnnnnnnnnnnnnnnnnnnnnnnnnnnnnnnnnnnnnnnnnnnnnnnnnnnnnnnnnnnnnnnnnnnnnnnnnnnnnnnnnnnnnnnnnnnnnnnnnnnnnnnnnnnnnnnnnnnnnnnnnnnnnnnnnnnnnnnnnnnnnnnnnnnnnnnnnnnnnnnnnnnnnnnnnnnnnnnnnnnnnnnnnnnnnnnnnnnnnnnnnnnnnnnnnnnnnnnnnnnnnnnnnnnnnnnnnnnnnnnnnnnnnnnnnnnnnnnnnnnnnnnnnnnnnnnnnnnnnnnnnnnnnnnnnnnnnnnnnnnnnnnnnnnnnnnnnnnnnnnnnnnnnnnnnnnnnnnnnnnnnnnnnnnnnnnnnnnnnnnnnnnnnnnnnnnnnnnnnnnnnnnnnnnnnnnnnnnnnnnnnnnnnnnnnnnnnnnnnnnnnnnnnnnnnnnnnnnnnnnnnnnnnnnnnnnnnnnnnnnnnnnnnnnnnnnnnnnnnnnnnnnnnnnnnnnnnnnnnnnnnnnnnnnnnnnnnnnnnnnnnnnnnnnnnnnnnnnnnnnnnnnnnnnnnnnnnnnnnnnnnnnnnnnnnnnnnnnnnnnnnnnnnnnnnnnnnnnnnnnnnnnnnnnnnnnnnnnnnnnnnnnnnnnnnnnnnnnnnnnnnnnnnnnnnnnnnnnnnnnnnnnnnnnnnnnnnnnnnnnnnnnnnnnnnnnnnnnnnnnnnnnnnnnnnnnnnnnnnnnnnnnnnnnnnnnnnnnnnnnnnnnnnnnnnnnnnnnnnnnnnnnnnnnnnnnnnnnnnnnnnnnnnnnnnnnnnnnnnnnnnnnnnnnnnnnnnnnnnnnnnnnnnnnnnnnnnnnnnnnnnnnnnnnnnnnnnnnnnnnnnnnnnnnnnnnnnnnnnnnnnnnnnnnnnnnnnnnnnnnnnnnnnnnnnnnnnnnnnnnnnnnnnnnnnnnnnnnnnnnnnnnnnnnnnnnnnnnnnnnnnnnnnnnnnnnnnnnnnnnnnnnnnnnnnnnnnnnnnnnnnnnnnnnnnnnnnnnnnnnnnnnnnnnnnnnnnnnnnnnnnnnnnnnnnnnnnnnnnnnnnnnnnnnnnnnnnnnnnnnnnnnnnnnnnnnnnnnnnnnnnnnnnnnnnnnnnnnnnnnnnnnnnnnnnnnnnnnnnnnnnnnnnnnnnnnnnnnnnnnnnnnnnnnnnnnnnnnnnnnnnnnnnnnnnnnnnnnnnnnnnnnnnnnnnnnnnnnnnnnnnnnnnnnnnnnnnnnnnnnnnnnnnnnnnnnnnnnnnnnnnnnnnnnnnnnnnnnnnnnnnnnnnnnnnnnnnnnnnnnnnnnnnnnnnnnnnnnnnnnnnnnnnnnnnnnnnnnnnnnnnnnnnnnnnnnnnnnnnnnnnnnnnnnnnnnnnnnnnnnnnnnnnnnnnnnnnnnnnnnnnnnnnnnnnnnnnnnnnnnnnnnnnnnnnnnnnnnnnnnnnnnnnnnnnnnnnnnnnnnnnnnnnnnnnnnnnnnnnnnnnnnnnnnnnnnnnnnnnnnnnnnnnnnnnnnnnnnnnnnnnnnnnnnnnnnnnnnnnnnnnnnnnnnnnnnnnnnnnnnnnnnnnnnnnnnnnnnnnnnnnnnnnnnnnnnnnnnnnnnnnnnnnnnnnnnnnnnnnnnnnnnnnnnnnnnnnnnnnnnnnnnnnnnnnnnnnnnnnnnnnnnnnnnnnnnnnnnnnnnnnnnnnnnnnnnnnnnnnnnnnnnnnnnnnnnnnnnnnnnnnnnnnnnnnnnnnnnnnnnnnnnnnnnnnnnnnnnnnnnnnnnnnnnnnnnnnnnnnnnnnnnnnnnnnnnnnnnnnnnnnnnnnnnnnnnnnnnnnnnnnnnnnnnnnnnnnnnnnnnnnnnnnnnnnnnnnnnnnnnnnnnnnnnnnnnnnnnnnnnnnnnnnnnnnnnnnnnnnnnnnnnnnnnnnnnnnnnnnnnnnnnnnnnnnnnnnnnnnnnnnnnnnnnnnnnnnnnnnnnnnnnnnnnnnnnnnnnnnnnnnnnnnnnnnnnnnnnnnnnnnnnnnnnnnnnnnnnnnnnnnnnnnnnnnnnnnnnnnnnnnnnnnnnnnnnnnnnnnnnnnnnnnnnnnnnnnnnnnnnnnnnnnnnnnnnnnnnnnnnnnnnnnnnnnnnnnnnnnnnnnnnnnnnnnnnnnnnnnnnnnnnnnnnnnnnnnnnnnnnnnnnnnnnnnnnnnnnnnnnnnnnnnnnnnnnnnnnnnnnnnnnnnnnnnnnnnnnnnnnnnnnnnnnnnnnnnnnnnnnnnnnnnnnnnnnnnnnnnnnnnnnnnnnnnnnnnnnnnnnnnnnnnnnnnnnnnnnnnnnnnnnnnnnnnnnnnnnnnnnnnnnnnnnnnnnnnnnnnnnnnnnnnnnnnnnnnnnnnnnnnnnnnnnnnnnnnnnnnnnnnnnnnnnnnnnnnnnnnnnnnnnnnnnnnnnnnnnnnnnnnnnnnnnnnnnnnnnnnnnnnnnnnnnnnnnnnnnnnnnnnnnnnnnnnnnnnnnnnnnnnnnnnnnnnnnnnnnnnnnnnnnnnnnnnnnnnnnnnnnnnnnnnnnnnnnnnnnnnnnnnnnnnnnnnnnnnnnnnnnnnnnnnnnnnnnnnnnnnnnnnnnnnnnnnnnnnnnnnnnnnnnnnnnnnnnnnnnnnnnnnnnnnnnnnnnnnnnnnnnnnnnnnnnnnnnnnnnnnnnnnnnnnnnnnnnnnnnnnnnnnnnnnnnnnnnnnnnnnnnnnnnnnnnnnnnnnnnnnnnnnnnnnnnnnnnnnnnnnnnnnnnnnnnnnnnnnnnnnnnnnnnnnnnnnnnnnnnnnnnnnnnnnnnnnnnnnnnnnnnnnnnnnnnnnnnnnnnnnnnnnnnnnnnnnnnnnnnnnnnnnnnnnnnnnnnnnnnnnnnnnnnnnnnnnnnnnnnnnnnnnnnnnnnnnnnnnnnnnnnnnnnnnnnnnnnnnnnnnnnnnnnnnnnnnnnnnnnnnnnnnnnnnnnnnnnnnnnnnnnnnnnnnnnnnnnnnnnnnnnnnnnnnnnnnnnnnnnnnnnnnnnnnnnnnnnnnnnnnnnnnnnnnnnnnnnnnnnnnnnnnnnnnnnnnnnnnnnnnnnnnnnnnnnnnnnnnnnnnnnnnnnnnnnnnnnnnnnnnnnnnnnnnnnnnnnnnnnnnnnnnnnnnnnnnnnnnnnnnnnnnnnnnnnnnnnnnnnnnnnnnnnnnnnnnnnnnnnnnnnnnnnnnnnnnnnnnnnnnnnnnnnnnnnnnnnnnnnnnnnnnnnnnnnnnnnnnnnnnnnnnnnnnnnnnnnnnnnnnnnnnnnnnnnnnnnnnnnnnnnnnnnnnnnnnnnnnnnnnnnnnnnnnnnnnnnnnnnnnnnnnnnnnnnnnnnnnnnnnnnnnnnnnnnnnnnnnnnnnnnnnnnnnnnnnnnnnnnnnnnnnnnnnnnnnnnnnnnnnnnnnnnnnnnnnnnnnnnnnnnnnnnnnnnnnnnnnnnnnnnnnnnnnnnnnnnnnnnnnnnnnnnnnnnnnnnnnnnnnnnnnnnnnnnnnnnnnnnnnnnnnnnnnnnnnnnnnnnnnnnnnnnnnnnnnnnnnnnnnnnnnnnnnnnnnnnnnnnnnnnnnnnnnnnnnnnnnnnnnnnnnnnnnnnnnnnnnnnnnnnnnnnnnnnnnnnnnnnnnnnnnnnnnnnnnnnnnnnnnnnnnnnnnnnnnnnnnnnnnnnnnnnnnnnnnnnnnnnnnnnnnnnnnnnnnnnnnnnnnnnnnnnnnnnnnnnnnnnnnnnnnnnnnnnnnnnnnnnnnnnnnnnnnnnnnnnnnnnnnnnnnnnnnnnnnnnnnnnnnnnnnnnnnnnnnnnnnnnnnnnnnnnnnnnnnnnnnnnnnnnnnnnnnnnnnnnnnnnnnnnnnnnnnnnnnnnnnnnnnnnnnnnnnnnnnnnnnnnnnnnnnnnnnnnnnnnnnnnnnnnnnnnnnnnnnnnnnnnnnnnnnnnnnnnnnnnnnnnnnnnnnnnnnnnnnnnnnnnnnnnnnnnnnnnnnnnnnnnnnnnnnnnnnnnnnnnnnnnnnnnnnnnnnnnnnnnnnnnnnnnnnnnnnnnnnnnnnnnnnnnnnnnnnnnnnnnnnnnnnnnnnnnnnnnnnnnnnnnnnnnnnnnnnnnnnnnnnnnnnnnnnnnnnnnnnnnnnnnnnnnnnnnnnnnnnnnnnnnnnnnnnnnnnnnnnnnnnnnnnnnnnnnnnnnnnnnnnnnnnnnnnnnnnnnnnnnnnnnnnnnnnnnnnnnnnnnnnnnnnnnnnnnnnnnnnnnnnnnnnnnnnnnnnnnnnnnnnnnnnnnnnnnnnnnnnnnnnnnnnnnnnnnnnnnnnnnnnnnnnnnnnnnnnnnnnnnnnnnnnnnnnnnnnnnnnnnnnnnnnnnnnnnnnnnnnnnnnnnnnnnnnnnnnnnnnnnnnnnnnnnnnnnnnnnnnnnnnnnnnnnnnnnnnnnnnnnnnnnnnnnnnnnnnnnnnnnnnnnnnnnnnnnnnnnnnnnnnnnnnnnnnnnnnnnnnnnnnnnnnnnnnnnnnnnnnnnnnnnnnnnnnnnnnnnnnnnnnnnnnnnnnnnnnnnnnnnnnnnnnnnnnnnnnnnnnnnnnnnnnnnnnnnnnnnnnnnnnnnnnnnnnnnnnnnnnnnnnnnnnnnnnnnnnnnnnnnnnnnnnnnnnnnnnnnnnnnnnnnnnnnnnnnnnnnnnnnnnnnnnnnnnnnnnnnnnnnnnnnnnnnnnnnnnnnnnnnnnnnnnnnnnnnnnnnnnnnnnnnnnnnnnnnnnnnnnnnnnnnnnnnnnnnnnnnnnnnnnnnnnnnnnnnnnnnnnnnnnnnnnnnnnnnnnnnnnnnnnnnnnnnnnnnnnnnnnnnnnnnnnnnnnnnnnnnnnnnnnnnnnnnnnnnnnnnnnnnnnnnnnnnnnnnnnnnnnnnnnnnnnnnnnnnnnnnnnnnnnnnnnnnnnnnnnnnnnnnnnnnnnnnnnnnnnnnnnnnnnnnnnnnnnnnnnnnnnnnnnnnnnnnnnnnnnnnnnnnnnnnnnnnnnnnnnnnnnnnnnnnnnnnnnnnnnnnnnnnnnnnnnnnnnnnnnnnnnnnnnnnnnnnnnnnnnnnnnnnnnnnnnnnnnnnnnnnnnnnnnnnnnnnnnnnnnnnnnnnnnnnnnnnnnnnnnnnnnnnnnnnnnnnnnnnnnnnnnnnnnnnnnnnnnnnnnnnnnnnnnnnnnnnnnnnnnnnnnnnnnnnnnnnnnnnnnnnnnnnnnnnnnnnnnnnnnnnnnnnnnnnnnnnnnnnnnnnnnnnnnnnnnnnnnnnnnnnnnnnnnnnnnnnnnnnnnnnnnnnnnnnnnnnnnnnnnnnnnnnnnnnnnnnnnnnnnnnnnnnnnnnnnnnnnnnnnnnnnnnnnnnnnnnnnnnnnnnnnnnnnnnnnnnnnnnnnnnnnnnnnnnnnnnnnnnnnnnnnnnnnnnnnnnnnnnnnnnnnnnnnnnnnnnnnnnnnnnnnnnnnnnnnnnnnnnnnnnnnnnnnnnnnnnnnnnnnnnnnnnnnnnnnnnnnnnnnnnnnnnnnnnnnnnnnnnnnnnnnnnnnnnnnnnnnnnnnnnnnnnnnnnnnnnnnnnnnnnnnnnnnnnnnnnnnnnnnnnnnnnnnnnnnnnnnnnnnnnnnnnnnnnnnnnnnnnnnnnnnnnnnnnnnnnnnnnnnnnnnnnnnnnnnnnnnnnnnnnnnnnnnnnnnnnnnnnnnnnnnnnnnnnnnnnnnnnnnnnnnnnnnnnnnnnnnnnnnnnnnnnnnnnnnnnnnnnnnnnnnnnnnnnnnnnnnnnnnnnnnnnnnnnnnnnnnnnnnnnnnnnnnnnnnnnnnnnnnnnnnnnnnnnnnnnnnnnnnnnnnnnnnnnnnnnnnnnnnnnnnnnnnnnnnnnnnnnnnnnnnnnnnnnnnnnnnnnnnnnnnnnnnnnnnnnnnnnnnnnnnnnnnnnnnnnnnnnnnnnnnnnnnnnnnnnnnnnnnnnnnnnnnnnnnnnnnnnnnnnnnnnnnnnnnnnnnnnnnnnnnnnnnnnnnnnnnnnnnnnnnnnnnnnnnnnnnnnnnnnnnnnnnnnnnnnnnnnnnnnnnnnnnnnnnnnnnnnnnnnnnnnnnnnnnnnnnnnnnnnnnnnnnnnnnnnnnnnnnnnnnnnnnnnnnnnnnnnnnnnnnnnnnnnnnnnnnnnnnnnnnnnnnnnnnnnnnnnnnnnnnnnnnnnnnnnnnnnnnnnnnnnnnnnnnnnnnnnnnnnnnnnnnnnnnnnnnnnnnnnnnnnnnnnnnnnnnnnnnnnnnnnnnnnnnnnnnnnnnnnnnnnnnnnnnnnnnnnnnnnnnnnnnnnnnnnnnnnnnnnnnnnnnnnnnnnnnnnnnnnnnnnnnnnnnnnnnnnnnnnnnnnnnnnnnnnnnnnnnnnnnnnnnnnnnnnnnnnnnnnnnnnnnnnnnnnnnnnnnnnnnnnnnnnnnnnnnnnnnnnnnnnnnnnnnnnnnnnnnnnnnnnnnnnnnnnnnnnnnnnnnnnnnnnnnnnnnnnnnnnnnnnnnnnnnnnnnnnnnnnnnnnnnnnnnnnnnnnnnnnnnnnnnnnnnnnnnnnnnnnnnnnnnnnnnnnnnnnnnnnnnnnnnnnnnnnnnnnnnnnnnnnnnnnnnnnnnnnnnnnnnnnnnnnnnnnnnnnnnnnnnnnnnnnnnnnnnnnnnnnnnnnnnnnnnnnnnnnnnnnnnnnnnnnnnnnnnnnnnnnnnnnnnnnnnnnnnnnnnnnnnnnnnnnnnnnnnnnnnnnnnnnnnnnnnnnnnnnnnnnnnnnnnnnnnnnnnnnnnnnnnnnnnnnnnnnnnnnnnnnnnnnnnnnnnnnnnnnnnnnnnnnnnnnnnnnnnnnnnnnnnnnnnnnnnnnnnnnnnnnnnnnnnnnnnnnnnnnnnnnnnnnnnnnnnnnnnnnnnnnnnnnnnnnnnnnnnnnnnnnnnnnnnnnnnnnnnnnnnnnnnnnnnnnnnnnnnnnnnnnnnnnnnnnnnnnnnnnnnnnnnnnnnnnnnnnnnnnnnnnnnnnnnnnnnnnnnnnnnnnnnnnnnnnnnnnnnnnnnnnnnnnnnnnnnnnnnnnnnnnnnnnnnnnnnnnnnnnnnnnnnnnnnnnnnnnnnnnnnnnnnnnnnnnnnnnnnnnnnnnnnnnnnnnnnnnnnnnnnnnnnnnnnnnnnnnnnnnnnnnnnnnnnnnnnnnnnnnnnnnnnnnnnnnnnnnnnnnnnnnnnnnnnnnnnnnnnnnnnnnnnnnnnnnnnnnnnnnnnnnnnnnnnnnnnnnnnnnnnnnnnnnnnnnnnnnnnnnnnnnnnnnnnnnnnnnnnnnnnnnnnnnnnnnnnnnnnnnnnnnnnnnnnnnnnnnnnnnnnnnnnnnnnnnnnnnnnnnnnnnnnnnnnnnnnnnnnnnnnnnnnnnnnnnnnnnnnnnnnnnnnnnnnnnnnnnnnnnnnnnnnnnnnnnnnnnnnnnnnnnnnnnnnnnnnnnnnnnnnnnnnnnnnnnnnnnnnnnnnnnnnnnnnnnnnnnnnnnnnnnnnnnnnnnnnnnnnnnnnnnnnnnnnnnnnnnnnnnnnnnnnnnnnnnnnnnnnnnnnnnnnnnnnnnnnnnnnnnnnnnnnnnnnnnnnnnnnnnnnnnnnnnnnnnnnnnnnnnnnnnnnnnnnnnnnnnnnnnnnnnnnnnnnnnnnnnnnnnnnnnnnnnnnnnnnnnnnnnnnnnnnnnnnnnnnnnnnnnnnnnnnnnnnnnnnnnnnnnnnnnnnnnnnnnnnnnnnnnnnnnnnnnnnnnnnnnnnnnnnnnnnnnnnnnnnnnnnnnnnnnnnnnnnnnnnnnnnnnnnnnnnnnnnnnnnnnnnnnnnnnnnnnnnnnnnnnnnnnnnnnnnnnnnnnnnnnnnnnnnnnnnnnnnnnnnnnnnnnnnnnnnnnnnnnnnnnnnnnnnnnnnnnnnnnnnnnnnnnnnnnnnnnnnnnnnnnnnnnnnnnnnnnnnnnnnnnnnnnnnnnnnnnnnnnnnnnnnnnnnnnnnnnnnnnnnnnnnnnnnnnnnnnnnnnnnnnnnnnnnnnnnnnnnnnnnnnnnnnnnnnnnnnnnnnnnnnnnnnnnnnnnnnnnnnnnnnnnnnnnnnnnnnnnnnnnnnnnnnnnnnnnnnnnnnnnnnnnnnnnnnnnnnnnnnnnnnnnnnnnnnnnnnnnnnnnnnnnnnnnnnnnnnnnnnnnnnnnnnnnnnnnnnnnnnnnnnnnnnnnnnnnnnnnnnnnnnnnnnnnnnnnnnnnnnnnnnnnnnnnnnnnnnnnnnnnnnnnnnnnnnnnnnnnnnnnnnnnnnnnnnnnnnnnnnnnnnnnnnnnnnnnnnnnnnnnnnnnnnnnnnnnnnnnnnnnnnnnnnnnnnnnnnnnnnnnnnnnnnnnnnnnnnnnnnnnnnnnnnnnnnnnnnnnnnnnnnnnnnnnnnnnnnnnnnnnnnnnnnnnnnnnnnnnnnnnnnnnnnnnnnnnnnnnnnnnnnnnnnnnnnnnnnnnnnnnnnnnnnnnnnnnnnnnnnnnnnnnnnnnnnnnnnnnnnnnnnnnnnnnnnnnnnnnnnnnnnnnnnnnnnnnnnnnnnnnnnnnnnnnnnnnnnnnnnnnnnnnnnnnnnnnnnnnnnnnnnnnnnnnnnnnnnnnnnnnnnnnnnnnnnnnnnnnnnnnnnnnnnnnnnnnnnnnnnnnnnnnnnnnnnnnnnnnnnnnnnnnnnnnnnnnnnnnnnnnnnnnnnnnnnnnnnnnnnnnnnnnnnnnnnnnnnnnnnnnnnnnnnnnnnnnnnnnnnnnnnnnnnnnnnnnnnnnnnnnnnnnnnnnnnnnnnnnnnnnnnnnnnnnnnnnnnnnnnnnnnnnnnnnnnnnnnnnnnnnnnnnnnnnnnnnnnnnnnnnnnnnnnnnnnnnnnnnnnnnnnnnnnnnnnnnnnnnnnnnnnnnnnnnnnnnnnnnnnnnnnnnnnnnnnnnnnnnnnnnnnnnnnnnnnnnnnnnnnnnnnnnnnnnnnnnnnnnnnnnnnnnnnnnnnnnnnnnnnnnnnnnnnnnnnnnnnnnnnnnnnnnnnnnnnnnnnnnnnnnnnnnnnnnnnnnnnnnnnnnnnnnnnnnnnnnnnnnnnnnnnnnnnnnnnnnnnnnnnnnnnnnnnnnnnnnnnnnnnnnnnnnnnnnnnnnnnnnnnnnnnnnnnnnnnnnnnnnnnnnnnnnnnnnnnnnnnnnnnnnnnnnnnnnnnnnnnnnnnnnnnnnnnnnnnnnnnnnnnnnnnnnnnnnnnnnnnnnnnnnnnnnnnnnnnnnnnnnnnnnnnnnnnnnnnnnnnnnnnnnnnnnnnnnnnnnnnnnnnnnnnnnnnnnnnnnnnnnnnnnnnnnnnnnnnnnnnnnnnnnnnnnnnnnnnnnnnnnnnnnnnnnnnnnnnnnnnnnnnnnnnnnnnnnnnnnnnnnnnnnnnnnnnnnnnnnnnnnnnnnnnnnnnnnnnnnnnnnnnnnnnnnnnnnnnnnnnnnnnnnnnnnnnnnnnnnnnnnnnnnnnnnnnnnnnnnnnnnnnnnnnnnnnnnnnnnnnnnnnnnnnnnnnnnnnnnnnnnnnnnnnnnnnnnnnnnnnnnnnnnnnnnnnnnnnnnnnnnnnnnnnnnnnnnnnnnnnnnnnnnnnnnnnnnnnnnnnnnnnnnnnnnnnnnnnnnnnnnnnnnnnnnnnnnnnnnnnnnnnnnnnnnnnnnnnnnnnnnnnnnnnnnnnnnnnnnnnnnnnnnnnnnnnnnnnnnnnnnnnnnnnnnnnnnnnnnnnnnnnnnnnnnnnnnnnnnnnnnnnnnnnnnnnnnnnnnnnnnnnnnnnnnnnnnnnnnnnnnnnnnnnnnnnnnnnnnnnnnnnnnnnnnnnnnnnnnnnnnnnnnnnnnnnnnnnnnnnnnnnnnnnnnnnnnnnnnnnnnnnnnnnnnnnnnnnnnnnnnnnnnnnnnnnnnnnnnnnnnnnnnnnnnnnnnnnnnnnnnnnnnnnnnnnnnnnnnnnnnnnnnnnnnnnnnnnnnnnnnnnnnnnnnnnnnnnnnnnnnnnnnnnnnnnnnnnnnnnnnnnnnnnnnnnnnnnnnnnnnnnnnnnnnnnnnnnnnnnnnnnnnnnnnnnnnnnnnnnnnnnnnnnnnnnnnnnnnnnnnnnnnnnnnnnnnnnnnnnnnnnnnnnnnnnnnnnnnnnnnnnnnnnnnnnnnnnnnnnnnnnnnnnnnnnnnnnnnnnnnnnnnnnnnnnnnnnnnnnnnnnnnnnnnnnnnnnnnnnnnnnnnnnnnnnnnnnnnnnnnnnnnnnnnnnnnnnnnnnnnnnnnnnnnnnnnnnnnnnnnnnnnnnnnnnnnnnnnnnnnnnnnnnnnnnnnnnnnnnnnnnnnnnnnnnnnnnnnnnnnnnnnnnnnnnnnnnnnnnnnnnnnnnnnnnnnnnnnnnnnnnnnnnnnnnnnnnnnnnnnnnnnnnnnnnnnnnnnnnnnnnnnnnnnnnnnnnnnnnnnnnnnnnnnnnnnnnnnnnnnnnnnnnnnnnnnnnnnnnnnnnnnnnnnnnnnnnnnnnnnnnnnnnnnnnnnnnnnnnnnnnnnnnnnnnnnnnnnnnnnnnnnnnnnnnnnnnnnnnnnnnnnnnnnnnnnnnnnnnnnnnnnnnnnnnnnnnnnnnnnnnnnnnnnnnnnnnnnnnnnnnnnnnnnnnnnnnnnnnnnnnnnnnnnnnnnnnnnnnnnnnnnnnnnnnnnnnnnnnnnnnnnnnnnnnnnnnnnnnnnnnnnnnnnnnnnnnnnnnnnnnnnnnnnnnnnnnnnnnnnnnnnnnnnnnnnnnnnnnnnnnnnnnnnnnnnnnnnnnnnnnnnnnnnnnnnnnnnnnnnnnnnnnnnnnnnnnnnnnnnnnnnnnnnnnnnnnnnnnnnnnnnnnnnnnnnnnnnnnnnnnnnnnnnnnnnnnnnnnnnnnnnnnnnnnnnnnnnnnnnnnnnnnnnnnnnnnnnnnnnnnnnnnnnnnnnnnnnnnnnnnnnnnnnnnnnnnnnnnnnnnnnnnnnnnnnnnnnnnnnnnnnnnnnnnnnnnnnnnnnnnnnnnnnnnnnnnnnnnnnnnnnnnnnnnnnnnnnnnnnnnnnnnnnnnnnnnnnnnnnnnnnnnnnnnnnnnnnnnnnnnnnnnnnnnnnnnnnnnnnnnnnnnnnnnnnnnnnnnnnnnnnnnnnnnnnnnnnnnnnnnnnnnnnnnnnnnnnnnnnnnnnnnnnnnnnnnnnnnnnnnnnnnnnnnnnnnnnnnnnnnnnnnnnnnnnnnnnnnnnnnnnnnnnnnnnnnnnnnnnnnnnnnnnnnnnnnnnnnnnnnnnnnnnnnnnnnnnnnnnnnnnnnnnnnnnnnnnnnnnnnnnnnnnnnnnnnnnnnnnnnnnnnnnnnnnnnnnnnnnnnnnnnnnnnnnnnnnnnnnnnnnnnnnnnnnnnnnnnnnnnnnnnnnnnnnnnnnnnnnnnnnnnnnnnnnnnnnnnnnnnnnnnnnnnnnnnnnnnnnnnnnnnnnnnnnnnnnnnnnnnnnnnnnnnnnnnnnnnnnnnnnnnnnnnnnnnnnnnnnnnnnnnnnnnnnnnnnnnnnnnnnnnnnnnnnnnnnnnnnnnnnnnnnnnnnnnnnnnnnnnnnnnnnnnnnnnnnnnnnnnnnnnnnnnnnnnnnnnnnnnnnnnnnnnnnnnnnnnnnnnnnnnnnnnnnnnnnnnnnnnnnnnnnnnnnnnnnnnnnnnnnnnnnnnnnnnnnnnnnnnnnnnnnnnnnnnnnnnnnnnnnnnnnnnnnnnnnnnnnnnnnnnnnnnnnnnnnnnnnnnnnnnnnnnnnnnnnnnnnnnnnnnnnnnnnnnnnnnnnnnnnnnnnnnnnnnnnnnnnnnnnnnnnnnnnnnnnnnnnnnnnnnnnnnnnnnnnnnnnnnnnnnnnnnnnnnnnnnnnnnnnnnnnnnnnnnnnnnnnnnnnnnnnnnnnnnnnnnnnnnnnnnnnnnnnnnnnnnnnnnnnnnnnnnnnnnnnnnnnnnnnnnnnnnnnnnnnnnnnnnnnnnnnnnnnnnnnnnnnnnnnnnnnnnnnnnnnnnnnnnnnnnnnnnnnnnnnnnnnnnnnnnnnnnnnnnnnnnnnnnnnnnnnnnnnnnnnnnnnnnnnnnnnnnnnnnnnnnnnnnnnnnnnnnnnnnnnnnnnnnnnnnnnnnnnnnnnnnnnnnnnnnnnnnnnnnnnnnnnnnnnnnnnnnnnnnnnnnnnnnnnnnnnnnnnnnnnnnnnnnnnnnnnnnnnnnnnnnnnnnnnnnnnnnnnnnnnnnnnnnnnnnnnnnnnnnnnnnnnnnnnnnnnnnnnnnnnnnnnnnnnnnnnnnnnnnnnnnnnnnnnnnnnnnnnnnnnnnnnnnnnnnnnnnnnnnnnnnnnnnnnnnnnnnnnnnnnnnnnnnnnnnnnnnnnnnnnnnnnnnnnnnnnnnnnnnnnnnnnnnnnnnnnnnnnnnnnnnnnnnnnnnnnnnnnnnnnnnnnnnnnnnnnnnnnnnnnnnnnnnnnnnnnnnnnnnnnnnnnnnnnnnnnnnnnnnnnnnnnnnnnnnnnnnnnnnnnnnnnnnnnnnnnnnnnnnnnnnnnnnnnnnnnnnnnnnnnnnnnnnnnnnnnnnnnnnnnnnnnnnnnnnnnnnnnnnnnnnnnnnnnnnnnnnnnnnnnnnnnnnnnnnnnnnnnnnnnnnnnnnnnnnnnnnnnnnnnnnnnnnnnnnnnnnnnnnnnnnnnnnnnnnnnnnnnnnnnnnnnnnnnnnnnnnnnnnnnnnnnnnnnnnnnnnnnnnnnnnnnnnnnnnnnnnnnnnnnnnnnnnnnnnnnnnnnnnnnnnnnnnnnnnnnnnnnnnnnnnnnnnnnnnnnnnnnnnnnnnnnnnnnnnnnnnnnnnnnnnnnnnnnnnnnnnnnnnnnnnnnnnnnnnnnnnnnnnnnnnnnnnnnnnnnnnnnnnnnnnnnnnnnnnnnnnnnnnnnnnnnnnnnnnnnnnnnnnnnnnnnnnnnnnnnnnnnnnnnnnnnnnnnnnnnnnnnnnnnnnnnnnnnnnnnnnnnnnnnnnnnnnnnnnnnnnnnnnnnnnnnnnnnnnnnnnnnnnnnnnnnnnnnnnnnnnnnnnnnnnnnnnnnnnnnnnnnnnnnnnnnnnnnnnnnnnnnnnnnnnnnnnnnnnnnnnnnnnnnnnnnnnnnnnnnnnnnnnnnnnnnnnnnnnnnnnnnnnnnnnnnnnnnnnnnnnnnnnnnnnnnnnnnnnnnnnnnnnnnnnnnnnnnnnnnnnnnnnnnnnnnnnnnnnnnnnnnnnnnnnnnnnnnnnnnnnnnnnnnnnnnnnnnnnnnnnnnnnnnnnnnnnnnnnnnnnnnnnnnnnnnnnnnnnnnnnnnnnnnnnnnnnnnnnnnnnnnnnnnnnnnnnnnnnnnnnnnnnnnnnnnnnnnnnnnnnnnnnnnnnnnnnnnnnnnnnnnnnnnnnnnnnnnnnnnnnnnnnnnnnnnnnnnnnnnnnnnnnnnnnnnnnnnnnnnnnnnnnnnnnnnnnnnnnnnnnnnnnnnnnnnnnnnnnnnnnnnnnnnnnnnnnnnnnnnnnnnnnnnnnnnnnnnnnnnnnnnnnnnnnnnnnnnnnnnnnnnnnnnnnnnnnnnnnnnnnnnnnnnnnnnnnnnnnnnnnnnnnnnnnnnnnnnnnnnnnnnnnnnnnnnnnnnnnnnnnnnnnnnnnnnnnnnnnnnnnnnnnnnnnnnnnnnnnnnnnnnnnnnnnnnnnnnnnnnnnnnnnnnnnnnnnnnnnnnnnnnnnnnnnnnnnnnnnnnnnnnnnnnnnnnnnnnnnnnnnnnnnnnnnnnnnnnnnnnnnnnnnnnnnnnnnnnnnnnnnnnnnnnnnnnnnnnnnnnnnnnnnnnnnnnnnnnnnnnnnnnnnnnnnnnnnnnnnnnnnnnnnnnnnnnnnnnnnnnnnnnnnnnnnnnnnnnnnnnnnnnnnnnnnnnnnnnnnnnnnnnnnnnnnnnnnnnnnnnnnnnnnnnnnnnnnnnnnnnnnnnnnnnnnnnnnnnnnnnnnnnnnnnnnnnnnnnnnnnnnnnnnnnnnnnnnnnnnnnnnnnnnnnnnnnnnnnnnnnnnnnnnnnnnnnnnnnnnnnnnnnnnnnnnnnnnnnnnnnnnnnnnnnnnnnnnnnnnnnnnnnnnnnnnnnnnnnnnnnnnnnnnnnnnnnnnnnnnnnnnnnnnnnnnnnnnnnnnnnnnnnnnnnnnnnnnnnnnnnnnnnnnnnnnnnnnnnnnnnnnnnnnnnnnnnnnnnnnnnnnnnnnnnnnnnnnnnnnnnnnnnnnnnnnnnnnnnnnnnnnnnnnnnnnnnnnnnnnnnnnnnnnnnnnnnnnnnnnnnnnnnnnnnnnnnnnnnnnnnnnnnnnnnnnnnnnnnnnnnnnnnnnnnnnnnnnnnnnnnnnnnnnnnnnnnnnnnnnnnnnnnnnnnnnnnnnnnnnnnnnnnnnnnnnnnnnnnnnnnnnnnnnnnnnnnnnnnnnnnnnnnnnnnnnnnnnnnnnnnnnnnnnnnnnnnnnnnnnnnnnnnnnnnnnnnnnnnnnnnnnnnnnnnnnnnnnnnnnnnnnnnnnnnnnnnnnnnnnnnnnnnnnnnnnnnnnnnnnnnnnnnnnnnnnnnnnnnnnnnnnnnnnnnnnnnnnnnnnnnnnnnnnnnnnnnnnnnnnnnnnnnnnnnnnnnnnnnnnnnnnnnnnnnnnnnnnnnnnnnnnnnnnnnnnnnnnnnnnnnnnnnnnnnnnnnnnnnnnnnnnnnnnnnnnnnnnnnnnnnnnnnnnnnnnnnnnnnnnnnnnnnnnnnnnnnnnnnnnnnnnnnnnnnnnnnnnnnnnnnnnnnnnnnnnnnnnnnnnnnnnnnnnnnnnnnnnnnnnnnnnnnnnnnnnnnnnnnnnnnnnnnnnnnnnnnnnnnnnnnnnnnnnnnnnnnnnnnnnnnnnnnnnnnnnnnnnnnnnnnnnnnnnnnnnnnnnnnnnnnnnnnnnnnnnnnnnnnnnnnnnnnnnnnnnnnnnnnnnnnnnnnnnnnnnnnnnnnnnnnnnnnnnnnnnnnnnnnnnnnnnnnnnnnnnnnnnnnnnnnnnnnnnnnnnnnnnnnnnnnnnnnnnnnnnnnnnnnnnnnnnnnnnnnnnnnnnnnnnnnnnnnnnnnnnnnnnnnnnnnnnnnnnnnnnnnnnnnnnnnnnnnnnnnnnnnnnnnnnnnnnnnnnnnnnnnnnnnnnnnnnnnnnnnnnnnnnnnnnnnnnnnnnnnnnnnnnnnnnnnnnnnnnnnnnnnnnnnnnnnnnnnnnnnnnnnnnnnnnnnnnnnnnnnnnnnnnnnnnnnnnnnnnnnnnnnnnnnnnnnnnnnnnnnnnnnnnnnnnnnnnnnnnnnnnnnnnnnnnnnnnnnnnnnnnnnnnnnnnnnnnnnnnnnnnnnnnnnnnnnnnnnnnnnnnnnnnnnnnnnnnnnnnnnnnnnnnnnnnnnnnnnnnnnnnnnnnnnnnnnnnnnnnnnnnnnnnnnnnnnnnnnnnnnnnnnnnnnnnnnnnnnnnnnnnnnnnnnnnnnnnnnnnnnnnnnnnnnnnnnnnnnnnnnnnnnnnnnnnnnnnnnnnnnnnnnnnnnnnnnnnnnnnnnnnnnnnnnnnnnnnnnnnnnnnnnnnnnnnnnnnnnnnnnnnnnnnnnnnnnnnnnnnnnnnnnnnnnnnnnnnnnnnnnnnnnnnnnnnnnnnnnnnnnnnnnnnnnnnnnnnnnnnnnnnnnnnnnnnnnnnnnnnnnnnnnnnnnnnnnnnnnnnnnnnnnnnnnnnnnnnnnnnnnnnnnnnnnnnnnnnnnnnnnnnnnnnnnnnnnnnnnnnnnnnnnnnnnnnnnnnnnnnnnnnnnnnnnnnnnnnnnnnnnnnnnnnnnnnnnnnnnnnnnnnnnnnnnnnnnnnnnnnnnnnnnnnnnnnnnnnnnnnnnnnnnnnnnnnnnnnnnnnnnnnnnnnnnnnnnnnnnnnnnnnnnnnnnnnnnnnnnnnnnnnnnnnnnnnnnnnnnnnnnnnnnnnnnnnnnnnnnnnnnnnnnnnnnnnnnnnnnnnnnnnnnnnnnnnnnnnnnnnnnnnnnnnnnnnnnnnnnnnnnnnnnnnnnnnnnnnnnnnnnnnnnnnnnnnnnnnnnnnnnnnnnnnnnnnnnnnnnnnnnnnnnnnnnnnnnnnnnnnnnnnnnnnnnnnnnnnnnnnnnnnnnnnnnnnnnnnnnnnnnnnnnnnnnnnnnnnnnnnnnnnnnnnnnnnnnnnnnnnnnnnnnnnnnnnnnnnnnnnnnnnnnnnnnnnnnnnnnnnnnnnnnnnnnnnnnnnnnnnnnnnnnnnnnnnnnnnnnnnnnnnnnnnnnnnnnnnnnnnnnnnnnnnnnnnnnnnnnnnnnnnnnnnnnnnnnnnnnnnnnnnnnnnnnnnnnnnnnnnnnnnnnnnnnnnnnnnnnnnnnnnnnnnnnnnnnnnnnnnnnnnnnnnnnnnnnnnnnnnnnnnnnnnnnnnnnnnnnnnnnnnnnnnnnnnnnnnnnnnnnnnnnnnnnnnnnnnnnnnnnnnnnnnnnnnnnnnnnnnnnnnnnnnnnnnnnnnnnnnnnnnnnnnnnnnnnnnnnnnnnnnnnnnnnnnnnnnnnnnnnnnnnnnnnnnnnnnnnnnnnnnnnnnnnnnnnnnnnnnnnnnnnnnnnnnnnnnnnnnnnnnnnnnnnnnnnnnnnnnnnnnnnnnnnnnnnnnnnnnnnnnnnnnnnnnnnnnnnnnnnnnnnnnnnnnnnnnnnnnnnnnnnnnnnnnnnnnnnnnnnnnnnnnnnnnnnnnnnnnnnnnnnnnnnnnnnnnnnnnnnnnnnnnnnnnnnnnnnnnnnnnnnnnnnnnnnnnnnnnnnnnnnnnnnnnnnnnnnnnnnnnnnnnnnnnnnnnnnnnnnnnnnnnnnnnnnnnnnnnnnnnnnnnnnnnnnnnnnnnnnnnnnnnnnnnnnnnnnnnnnnnnnnnnnnnnnnnnnnnnnnnnnnnnnnnnnnnnnnnnnnnnnnnnnnnnnnnnnnnnnnnnnnnnnnnnnnnnnnnnnnnnnnnnnnnnnnnnnnnnnnnnnnnnnnnnnnnnnnnnnnnnnnnnnnnnnnnnnnnnnnnnnnnnnnnnnnnnnnnnnnnnnnnnnnnnnnnnnnnnnnnnnnnnnnnnnnnnnnnnnnnnnnnnnnnnnnnnnnnnnnnnnnnnnnnnnnnnnnnnnnnnnnnnnnnnnnnnnnnnnnnnnnnnnnnnnnnnnnnnnnnnnnnnnnnnnnnnnnnnnnnnnnnnnnnnnnnnnnnnnnnnnnnnnnnnnnnnnnnnnnnnnnnnnnnnnnnnnnnnnnnnnnnnnnnnnnnnnnnnnnnnnnnnnnnnnnnnnnnnnnnnnnnnnnnnnnnnnnnnnnnnnnnnnnnnnnnnnnnnnnnnnnnnnnnnnnnnnnnnnnnnnnnnnnnnnnnnnnnnnnnnnnnnnnnnnnnnnnnnnnnnnnnnnnnnnnnnnnnnnnnnnnnnnnnnnnnnnnnnnnnnnnnnnnnnnnnnnnnnnnnnnnnnnnnnnnnnnnnnnnnnnnnnnnnnnnnnnnnnnnnnnnnnnnnnnnnnnnnnnnnnnnnnnnnnnnnnnnnnnnnnnnnnnnnnnnnnnnnnnnnnnnnnnnnnnnnnnnnnnnnnnnnnnnnnnnnnnnnnnnnnnnnnnnnnnnnnnnnnnnnnnnnnnnnnnnnnnnnnnnnnnnnnnnnnnnnnnnnnnnnnnnnnnnnnnnnnnnnnnnnnnnnnnnnnnnnnnnnnnnnnnnnnnnnnnnnnnnnnnnnnnnnnnnnnnnnnnnnnnnnnnnnnnnnnnnnnnnnnnnnnnnnnnnnnnnnnnnnnnnnnnnnnnnnnnnnnnnnnnnnnnnnnnnnnnnnnnnnnnnnnnnnnnnnnnnnnnnnnnnnnnnnnnnnnnnnnnnnnnnnnnnnnnnnnnnnnnnnnnnnnnnnnnnnnnnnnnnnnnnnnnnnnnnnnnnnnnnnnnnnnnnnnnnnnnnnnnnnnnnnnnnnnnnnnnnnnnnnnnnnnnnnnnnnnnnnnnnnnnnnnnnnnnnnnnnnnnnnnnnnnnnnnnnnnnnnnnnnnnnnnnnnnnnnnnnnnnnnnnnnnnnnnnnnnnnnnnnnnnnnnnnnnnnnnnnnnnnnnnnnnnnnnnnnnnnnnnnnnnnnnnnnnnnnnnnnnnnnnnnnnnnnnnnnnnnnnnnnnnnnnnnnnnnnnnnnnnnnnnnnnnnnnnnnnnnnnnnnnnnnnnnnnnnnnnnnnnnnnnnnnnnnnnnnnnnnnnnnnnnnnnnnnnnnnnnnnnnnnnnnnnnnnnnnnnnnnnnnnnnnnnnnnnnnnnnnnnnnnnnnnnnnnnnnnnnnnnnnnnnnnnnnnnnnnnnnnnnnnnnnnnnnnnnnnnnnnnnnnnnnnnnnnnnnnnnnnnnnnnnnnnnnnnnnnnnnnnnnnnnnnnnnnnnnnnnnnnnnnnnnnnnnnnnnnnnnnnnnnnnnnnnnnnnnnnnnnnnnnnnnnnnnnnnnnnnnnnnnnnnnnnnnnnnnnnnnnnnnnnnnnnnnnnnnnnnnnnnnnnnnnnnnnnnnnnnnnnnnnnnnnnnnnnnnnnnnnnnnnnnnnnnnnnnnnnnnnnnnnnnnnnnnnnnnnnnnnnnnnnnnnnnnnnnnnnnnnnnnnnnnnnnnnnnnnnnnnnnnnnnnnnnnnnnnnnnnnnnnnnnnnnnnnnnnnnnnnnnnnnnnnnnnnnnnnnnnnnnnnnnnnnnnnnnnnnnnnnnnnnnnnnnnnnnnnnnnnnnnnnnnnnnnnnnnnnnnnnnnnnnnnnnnnnnnnnnnnnnnnnnnnnnnnnnnnnnnnnnnnnnnnnnnnnnnnnnnnnnnnnnnnnnnnnnnnnnnnnnnnnnnnnnnnnnnnnnnnnnnnnnnnnnnnnnnnnnnnnnnnnnnnnnnnnnnnnnnnnnnnnnnnnnnnnnnnnnnnnnnnnnnnnnnnnnnnnnnnnnnnnnnnnnnnnnnnnnnnnnnnnnnnnnnnnnnnnnnnnnnnnnnnnnnnnnnnnnnnnnnnnnnnnnnnnnnnnnnnnnnnnnnnnnnnnnnnnnnnnnnnnnnnnnnnnnnnnnnnnnnnnnnnnnnnnnnnnnnnnnnnnnnnnnnnnnnnnnnnnnnnnnnnnnnnnnnnnnnnnnnnnnnnnnnnnnnnnnnnnnnnnnnnnnnnnnnnnnnnnnnnnnnnnnnnnnnnnnnnnnnnnnnnnnnnnnnnnnnnnnnnnnnnnnnnnnnnnnnnnnnnnnnnnnnnnnnnnnnnnnnnnnnnnnnnnnnnnnnnnnnnnnnnnnnnnnnnnnnnnnnnnnnnnnnnnnnnnnnnnnnnnnnnnnnnnnnnnnnnnnnnnnnnnnnnnnnnnnnnnnnnnnnnnnnnnnnnnnnnnnnnnnnnnnnnnnnnnnnnnnnnnnnnnnnnnnnnnnnnnnnnnnnnnnnnnnnnnnnnnnnnnnnnnnnnnnnnnnnnnnnnnnnnnnnnnnnnnnnnnnnnnnnnnnnnnnnnnnnnnnnnnnnnnnnnnnnnnnnnnnnnnnnnnnnnnnnnnnnnnnnnnnnnnnnnnnnnnnnnnnnnnnnnnnnnnnnnnnnnnnnnnnnnnnnnnnnnnnnnnnnnnnnnnnnnnnnnnnnnnnnnnnnnnnnnnnnnnnnnnnnnnnnnnnnnnnnnnnnnnnnnnnnnnnnnnnnnnnnnnnnnnnnnnnnnnnnnnnnnnnnnnnnnnnnnnnnnnnnnnnnnnnnnnnnnnnnnnnnnnnnnnnnnnnnnnnnnnnnnnnnnnnnnnnnnnnnnnnnnnnnnnnnnnnnnnnnnnnnnnnnnnnnnnnnnnnnnnnnnnnnnnnnnnnnnnnnnnnnnnnnnnnnnnnnnnnnnnnnnnnnnnnnnnnnnnnnnnnnnnnnnnnnnnnnnnnnnnnnnnnnnnnnnnnnnnnnnnnnnnnnnnnnnnnnnnnnnnnnnnnnnnnnnnnnnnnnnnnnnnnnnnnnnnnnnnnnnnnnnnnnnnnnnnnnnnnnnnnnnnnnnnnnnnnnnnnnnnnnnnnnnnnnnnnnnnnnnnnnnnnnnnnnnnnnnnnnnnnnnnnnnnnnnnnnnnnnnnnnnnnnnnnnnnnnnnnnnnnnnnnnnnnnnnnnnnnnnnnnnnnnnnnnnnnnnnnnnnnnnnnnnnnnnnnnnnnnnnnnnnnnnnnnnnnnnnnnnnnnnnnnnnnnnnnnnnnnnnnnnnnnnnnnnnnnnnnnnnnnnnnnnnnnnnnnnnnnnnnnnnnnnnnnnnnnnnnnnnnnnnnnnnnnnnnnnnnnnnnnnnnnnnnnnnnnnnnnnnnnnnnnnnnnnnnnnnnnnnnnnnnnnnnnnnnnnnnnnnnnnnnnnnnnnnnnnnnnnnnnnnnnnnnnnnnnnnnnnnnnnnnnnnnnnnnnnnnnnnnnnnnnnnnnnnnnnnnnnnnnnnnnnnnnnnnnnnnnnnnnnnnnnnnnnnnnnnnnnnnnnnnnnnnnnnnnnnnnnnnnnnnnnnnnnnnnnnnnnnnnnnnnnnnnnnnnnnnnnnnnnnnnnnnnnnnnnnnnnnnnnnnnnnnnnnnnnnnnnnnnnnnnnnnnnnnnnnnnnnnnnnnnnnnnnnnnnnnnnnnnnnnnnnnnnnnnnnnnnnnnnnnnnnnnnnnnnnnnnnnnnnnnnnnnnnnnnnnnnnnnnnnnnnnnnnnnnnnnnnnnnnnnnnnnnnnnnnnnnnnnnnnnnnnnnnnnnnnnnnnnnnnnnnnnnnnnnnnnnnnnnnnnnnnnnnnnnnnnnnnnnnnnnnnnnnnnnnnnnnnnnnnnnnnnnnnnnnnnnnnnnnnnnnnnnnnnnnnnnnnnnnnnnnnnnnnnnnnnnnnnnnnnnnnnnnnnnnnnnnnnnnnnnnnnnnnnnnnnnnnnnnnnnnnnnnnnnnnnnnnnnnnnnnnnnnnnnnnnnnnnnnnnnnnnnnnnnnnnnnnnnnnnnnnnnnnnnnnnnnnnnnnnnnnnnnnnnnnnnnnnnnnnnnnnnnnnnnnnnnnnnnnnnnnnnnnnnnnnnnnnnnnnnnnnnnnnnnnnnnnnnnnnnnnnnnnnnnnnnnnnnnnnnnnnnnnnnnnnnnnnnnnnnnnnnnnnnnnnnnnnnnnnnnnnnnnnnnnnnnnnnnnnnnnnnnnnnnnnnnnnnnnnnnnnnnnnnnnnnnnnnnnnnnnnnnnnnnnnnnnnnnnnnnnnnnnnnnnnnnnnnnnnnnnnnnnnnnnnnnnnnnnnnnnnnnnnnnnnnnnnnnnnnnnnnnnnnnnnnnnnnnnnnnnnnnnnnnnnnnnnnnnnnnnnnnnnnnnnnnnnnnnnnnnnnnnnnnnnnnnnnnnnnnnnnnnnnnnnnnnnnnnnnnnnnnnnnnnnnnnnnnnnnnnnnnnnnnnnnnnnnnnnnnnnnnnnnnnnnnnnnnnnnnnnnnnnnnnnnnnnnnnnnnnnnnnnnnnnnnnnnnnnnnnnnnnnnnnnnnnnnnnnnnnnnnnnnnnnnnnnnnnnnnnnnnnnnnnnnnnnnnnnnnnnnnnnnnnnnnnnnnnnnnnnnnnnnnnnnnnnnnnnnnnnnnnnnnnnnnnnnnnnnnnnnnnnnnnnnnnnnnnnnnnnnnnnnnnnnnnnnnnnnnnnnnnnnnnnnnnnnnnnnnnnnnnnnnnnnnnnnnnnnnnnnnnnnnnnnnnnnnnnnnnnnnnnnnnnnnnnnnnnnnnnnnnnnnnnnnnnnnnnnnnnnnnnnnnnnnnnnnnnnnnnnnnnnnnnnnnnnnnnnnnnnnnnnnnnnnnnnnnnnnnnnnnnnnnnnnnnnnnnnnnnnnnnnnnnnnnnnnnnnnnnnnnnnnnnnnnnnnnnnnnnnnnnnnnnnnnnnnnnnnnnnnnnnnnnnnnnnnnnnnnnnnnnnnnnnnnnnnnnnnnnnnnnnnnnnnnnnnnnnnnnnnnnnnnnnnnnnnnnnnnnnnnnnnnnnnnnnnnnnnnnnnnnnnnnnnnnnnnnnnnnnnnnnnnnnnnnnnnnnnnnnnnnnnnnnnnnnnnnnnnnnnnnnnnnnnnnnnnnnnnnnnnnnnnnnnnnnnnnnnnnnnnnnnnnnnnnnnnnnnnnnnnnnnnnnnnnnnnnnnnnnnnnnnnnnnnnnnnnnnnnnnnnnnnnnnnnnnnnnnnnnnnnnnnnnnnnnnnnnnnnnnnnnnnnnnnnnnnnnnnnnnnnnnnnnnnnnnnnnnnnnnnnnnnnnnnnnnnnnnnnnnnnnnnnnnnnnnnnnnnnnnnnnnnnnnnnnnnnnnnnnnnnnnnnnnnnnnnnnnnnnnnnnnnnnnnnnnnnnnnnnnnnnnnnnnnnnnnnnnnnnnnnnnnnnnnnnnnnnnnnnnnnnnnnnnnnnnnnnnnnnnnnnnnnnnnnnnnnnnnnnnnnnnnnnnnnnnnnnnnnnnnnnnnnnnnnnnnnnnnnnnnnnnnnnnnnnnnnnnnnnnnnnnnnnnnnnnnnnnnnnnnnnnnnnnnnnnnnnnnnnnnnnnnnnnnnnnnnnnnnnnnnnnnnnnnnnnnnnnnnnnnnnnnnnnnnnnnnnnnnnnnnnnnnnnnnnnnnnnnnnnnnnnnnnnnnnnnnnnnnnnnnnnnnnnnnnnnnnnnnnnnnnnnnnnnnnnnnnnnnnnnnnnnnnnnnnnnnnnnnnnnnnnnnnnnnnnnnnnnnnnnnnnnnnnnnnnnnnnnnnnnnnnnnnnnnnnnnnnnnnnnnnnnnnnnnnnnnnnnnnnnnnnnnnnnnnnnnnnnnnnnnnnnnnnnnnnnnnnnnnnnnnnnnnnnnnnnnnnnnnnnnnnnnnnnnnnnnnnnnnnnnnnnnnnnnnnnnnnnnnnnnnnnnnnnnnnnnnnnnnnnnnnnnnnnnnnnnnnnnnnnnnnnnnnnnnnnnnnnnnnnnnnnnnnnnnnnnnnnnnnnnnnnnnnnnnnnnnnnnnnnnnnnnnnnnnnnnnnnnnnnnnnnnnnnnnnnnnnnnnnnnnnnnnnnnnnnnnnnnnnnnnnnnnnnnnnnnnnnnnnnnnnnnnnnnnnnnnnnnnnnnnnnnnnnnnnnnnnnnnnnnnnnnnnnnnnnnnnnnnnnnnnnnnnnnnnnnnnnnnnnnnnnnnnnnnnnnnnnnnnnnnnnnnnnnnnnnnnnnnnnnnnnnnnnnnnnnnnnnnnnnnnnnnnnnnnnnnnnnnnnnnnnnnnnnnnnnnnnnnnnnnnnnnnnnnnnnnnnnnnnnnnnnnnnnnnnnnnnnnnnnnnnnnnnnnnnnnnnnnnnnnnnnnnnnnnnnnnnnnnnnnnnnnnnnnnnnnnnnnnnnnnnnnnnnnnnnnnnnnnnnnnnnnnnnnnnnnnnnnnnnnnnnnnnnnnnnnnnnnnnnnnnnnnnnnnnnnnnnnnnnnnnnnnnnnnnnnnnnnnnnnnnnnnnnnnnnnnnnnnnnnnnnnnnnnnnnnnnnnnnnnnnnnnnnnnnnnnnnnnnnnnnnnnnnnnnnnnnnnnnnnnnnnnnnnnnnnnnnnnnnnnnnnnnnnnnnnnnnnnnnnnnnnnnnnnnnnnnnnnnnnnnnnnnnnnnnnnnnnnnnnnnnnnnnnnnnnnnnnnnnnnnnnnnnnnnnnnnnnnnnnnnnnnnnnnnnnnnnnnnnnnnnnnnnnnnnnnnnnnnnnnnnnnnnnnnnnnnnnnnnnnnnnnnnnnnnnnnnnnnnnnnnnnnnnnnnnnnnnnnnnnnnnnnnnnnnnnnnnnnnnnnnnnnnnnnnnnnnnnnnnnnnnnnnnnnnnnnnnnnnnnnnnnnnnnnnnnnnnnnnnnnnnnnnnnnnnnnnnnnnnnnnnnnnnnnnnnnnnnnnnnnnnnnnnnnnnnnnnnnnnnnnnnnnnnnnnnnnnnnnnnnnnnnnnnnnnnnnnnnnnnnnnnnnnnnnnnnnnnnnnnnnnnnnnnnnnnnnnnnnnnnnnnnnnnnnnnnnnnnnnnnnnnnnnnnnnnnnnnnnnnnnnnnnnnnnnnnnnnnnnnnnnnnnnnnnnnnnnnnnnnnnnnnnnnnnnnnnnnnnnnnnnnnnnnnnnnnnnnnnnnnnnnnnnnnnnnnnnnnnnnnnnnnnnnnnnnnnnnnnnnnnnnnnnnnnnnnnnnnnnnnnnnnnnnnnnnnnnnnnnnnnnnnnnnnnnnnnnnnnnnnnnnnnnnnnnnnnnnnnnnnnnnnnnnnnnnnnnnnnnnnnnnnnnnnnnnnnnnnnnnnnnnnnnnnnnnnnnnnnnnnnnnnnnnnnnnnnnnnnnnnnnnnnnnnnnnnnnnnnnnnnnnnnnnnnnnnnnnnnnnnnnnnnnnnnnnnnnnnnnnnnnnnnnnnnnnnnnnnnnnnnnnnnnnnnnnnnnnnnnnnnnnnnnnnnnnnnnnnnnnnnnnnnnnnnnnnnnnnnnnnnnnnnnnnnnnnnnnnnnnnnnnnnnnnnnnnnnnnnnnnnnnnnnnnnnnnnnnnnnnnnnnnnnnnnnnnnnnnnnnnnnnnnnnnnnnnnnnnnnnnnnnnnnnnnnnnnnnnnnnnnnnnnnnnnnnnnnnnnnnnnnnnnnnnnnnnnnnnnnnnnnnnnnnnnnnnnnnnnnnnnnnnnnnnnnnnnnnnnnnnnnnnnnnnnnnnnnnnnnnnnnnnnnnnnnnnnnnnnnnnnnnnnnnnnnnnnnnnnnnnnnnnnnnnnnnnnnnnnnnnnnnnnnnnnnnnnnnnnnnnnnnnnnnnnnnnnnnnnnnnnnnnnnnnnnnnnnnnnnnnnnnnnnnnnnnnnnnnnnnnnnnnnnnnnnnnnnnnnnnnnnnnnnnnnnnnnnnnnnnnnnnnnnnnnnnnnnnnnnnnnnnnnnnnnnnnnnnnnnnnnnnnnnnnnnnnnnnnnnnnnnnnnnnnnnnnnnnnnnnnnnnnnnnnnnnnnnnnnnnnnnnnnnnnnnnnnnnnnnnnnnnnnnnnnnnnnnnnnnnnnnnnnnnnnnnnnnnnnnnnnnnnnnnnnnnnnnnnnnnnnnnnnnnnnnnnnnnnnnnnnnnnnnnnnnnnnnnnnnnnnnnnnnnnnnnnnnnnnnnnnnnnnnnnnnnnnnnnnnnnnnnnnnnnnnnnnnnnnnnnnnnnnnnnnnnnnnnnnnnnnnnnnnnnnnnnnnnnnnnnnnnnnnnnnnnnnnnnnnnnnnnnnnnnnnnnnnnnnnnnnnnnnnnnnnnnnnnnnnnnnnnnnnnnnnnnnnnnnnnnnnnnnnnnnnnnnnnnnnnnnnnnnnnnnnnnnnnnnnnnnnnnnnnnnnnnnnnnnnnnnnnnnnnnnnnnnnnnnnnnnnnnnnnnnnnnnnnnnnnnnnnnnnnnnnnnnnnnnnnnnnnnnnnnnnnnnnnnnnnnnnnnnnnnnnnnnnnnnnnnnnnnnnnnnnnnnnnnnnnnnnnnnnnnnnnnnnnnnnnnnnnnnnnnnnnnnnnnnnnnnnnnnnnnnnnnnnnnnnnnnnnnnnnnnnnnnnnnnnnnnnnnnnnnnnnnnnnnnnnnnnnnnnnnnnnnnnnnnnnnnnnnnnnnnnnnnnnnnnnnnnnnnnnnnnnnnnnnnnnnnnnnnnnnnnnnnnnnnnnnnnnnnnnnnnnnnnnnnnnnnnnnnnnnnnnnnnnnnnnnnnnnnnnnnnnnnnnnnnnnnnnnnnnnnnnnnnnnnnnnnnnnnnnnnnnnnnnnnnnnnnnnnnnnnnnnnnnnnnnnnnnnnnnnnnnnnnnnnnnnnnnnnnnnnnnnnnnnnnnnnnnnnnnnnnnnnnnnnnnnnnnnnnnnnnnnnnnnnnnnnnnnnnnnnnnnnnnnnnnnnnnnnnnnnnnnnnnnnnnnnnnnnnnnnnnnnnnnnnnnnnnnnnnnnnnnnnnnnnnnnnnnnnnnnnnnnnnnnnnnnnnnnnnnnnnnnnnnnnnnnnnnnnnnnnnnnnnnnnnnnnnnnnnnnnnnnnnnnnnnnnnnnnnnnnnnnnnnnnnnnnnnnnnnnnnnnnnnnnnnnnnnnnnnnnnnnnnnnnnnnnnnnnnnnnnnnnnnnnnnnnnnnnnnnnnnnnnnnnnnnnnnnnnnnnnnnnnnnnnnnnnnnnnnnnnnnnnnnnnnnnnnnnnnnnnnnnnnnnnnnnnnnnnnnnnnnnnnnnnnnnnnnnnnnnnnnnnnnnnnnnnnnnnnnnnnnnnnnnnnnnnnnnnnnnnnnnnnnnnnnnnnnnnnnnnnnnnnnnnnnnnnnnnnnnnnnnnnnnnnnnnnnnnnnnnnnnnnnnnnnnnnnnnnnnnnnnnnnnnnnnnnnnnnnnnnnnnnnnnnnnnnnnnnnnnnnnnnnnnnnnnnnnnnnnnnnnnnnnnnnnnnnnnnnnnnnnnnnnnnnnnnnnnnnnnnnnnnnnnnnnnnnnnnnnnnnnnnnnnnnnnnnnnnnnnnnnnnnnnnnnnnnnnnnnnnnnnnnnnnnnnnnnnnnnnnnnnnnnnnnnnnnnnnnnnnnnnnnnnnnnnnnnnnnnnnnnnnnnnnnnnnnnnnnnnnnnnnnnnnnnnnnnnnnnnnnnnnnnnnnnnnnnnnnnnnnnnnnnnnnnnnnnnnnnnnnnnnnnnnnnnnnnnnnnnnnnnnnnnnnnnnnnnnnnnnnnnnnnnnnnnnnnnnnnnnnnnnnnnnnnnnnnnnnnnnnnnnnnnnnnnnnnnnnnnnnnnnnnnnnnnnnnnnnnnnnnnnnnnnnnnnnnnnnnnnnnnnnnnnnnnnnnnnnnnnnnnnnnnnnnnnnnnnnnnnnnnnnnnnnnnnnnnnnnnnnnnnnnnnnnnnnnnnnnnnnnnnnnnnnnnnnnnnnnnnnnnnnnnnnnnnnnnnnnnnnnnnnnnnnnnnnnnnnnnnnnnnnnnnnnnnnnnnnnnnnnnnnnnnnnnnnnnnnnnnnnnnnnnnnnnnnnnnnnnnnnnnnnnnnnnnnnnnnnnnnnnnnnnnnnnnnnnnnnnnnnnnnnnnnnnnnnnnnnnnnnnnnnnnnnnnnnnnnnnnnnnnnnnnnnnnnnnnnnnnnnnnnnnnnnnnnnnnnnnnnnnnnnnnnnnnnnnnnnnnnnnnnnnnnnnnnnnnnnnnnnnnnnnnnnnnnnnnnnnnnnnnnnnnnnnnnnnnnnnnnnnnnnnnnnnnnnnnnnnnnnnnnnnnnnnnnnnnnnnnnnnnnnnnnnnnnnnnnnnnnnnnnnnnnnnnnnnnnnnnnnnnnnnnnnnnnnnnnnnnnnnnnnnnnnnnnnnnnnnnnnnnnnnnnnnnnnnnnnnnnnnnnnnnnnnnnnnnnnnnnnnnnnnnnnnnnnnnnnnnnnnnnnnnnnnnnnnnnnnnnnnnnnnnnnnnnnnnnnnnnnnnnnnnnnnnnnnnnnnnnnnnnnnnnnnnnnnnnnnnnnnnnnnnnnnnnnnnnnnnnnnnnnnnnnnnnnnnnnnnnnnnnnnnnnnnnnnnnnnnnnnnnnnnnnnnnnnnnnnnnnnnnnnnnnnnnnnnnnnnnnnnnnnnnnnnnnnnnnnnnnnnnnnnnnnnnnnnnnnnnnnnnnnnnnnnnnnnnnnnnnnnnnnnnnnnnnnnnnnnnnnnnnnnnnnnnnnnnnnnnnnnnnnnnnnnnnnnnnnnnnnnnnnnnnnnnnnnnnnnnnnnnnnnnnnnnnnnnnnnnnnnnnnnnnnnnnnnnnnnnnnnnnnnnnnnnnnnnnnnnnnnnnnnnnnnnnnnnnnnnnnnnnnnnnnnnnnnnnnnnnnnnnnnnnnnnnnnnnnnnnnnnnnnnnnnnnnnnnnnnnnnnnnnnnnnnnnnnnnnnnnnnnnnnnnnnnnnnnnnnnnnnnnnnnnnnnnnnnnnnnnnnnnnnnnnnnnnnnnnnnnnnnnnnnnnnnnnnnnnnnnnnnnnnnnnnnnnnnnnnnnnnnnnnnnnnnnnnnnnnnnnnnnnnnnnnnnnnnnnnnnnnnnnnnnnnnnnnnnnnnnnnnnnnnnnnnnnnnnnnnnnnnnnnnnnnnnnnnnnnnnnnnnnnnnnnnnnnnnnnnnnnnnnnnnnnnnnnnnnnnnnnnnnnnnnnnnnnnnnnnnnnnnnnnnnnnnnnnnnnnnnnnnnnnnnnnnnnnnnnnnnnnnnnnnnnnnnnnnnnnnnnnnnnnnnnnnnnnnnnnnnnnnnnnnnnnnnnnnnnnnnnnnnnnnnnnnnnnnnnnnnnnnnnnnnnnnnnnnnnnnnnnnnnnnnnnnnnnnnnnnnnnnnnnnnnnnnnnnnnnnnnnnnnnnnnnnnnnnnnnnnnnnnnnnnnnnnnnnnnnnnnnnnnnnnnnnnnnnnnnnnnnnnnnnnnnnnnnnnnnnnnnnnnnnnnnnnnnnnnnnnnnnnnnnnnnnnnnnnnnnnnnnnnnnnnnnnnnnnnnnnnnnnnnnnnnnnnnnnnnnnnnnnnnnnnnnnnnnnnnnnnnnnnnnnnnnnnnnnnnnnnnnnnnnnnnnnnnnnnnnnnnnnnnnnnnnnnnnnnnnnnnnnnnnnnnnnnnnnnnnnnnnnnnnnnnnnnnnnnnnnnnnnnnnnnnnnnnnnnnnnnnnnnnnnnnnnnnnnnnnnnnnnnnnnnnnnnnnnnnnnnnnnnnnnnnnnnnnnnnnnnnnnnnnnnnnnnnnnnnnnnnnnnnnnnnnnnnnnnnnnnnnnnnnnnnnnnnnnnnnnnnnnnnnnnnnnnnnnnnnnnnnnnnnnnnnnnnnnnnnnnnnnnnnnnnnnnnnnnnnnnnnnnnnnnnnnnnnnnnnnnnnnnnnnnnnnnnnnnnnnnnnnnnnnnnnnnnnnnnnnnnnnnnnnnnnnnnnnnnnnnnnnnnnnnnnnnnnnnnnnnnnnnnnnnnnnnnnnnnnnnnnnnnnnnnnnnnnnnnnnnnnnnnnnnnnnnnnnnnnnnnnnnnnnnnnnnnnnnnnnnnnnnnnnnnnnnnnnnnnnnnnnnnnnnnnnnnnnnnnnnnnnnnnnnnnnnnnnnnnnnnnnnnnnnnnnnnnnnnnnnnnnnnnnnnnnnnnnnnnnnnnnnnnnnnnnnnnnnnnnnnnnnnnnnnnnnnnnnnnnnnnnnnnnnnnnnnnnnnnnnnnnnnnnnnnnnnnnnnnnnnnnnnnnnnnnnnnnnnnnnnnnnnnnnnnnnnnnnnnnnnnnnnnnnnnnnnnnnnnnnnnnnnnnnnnnnnnnnnnnnnnnnnnnnnnnnnnnnnnnnnnnnnnnnnnnnnnnnnnnnnnnnnnnnnnnnnnnnnnnnnnnnnnnnnnnnnnnnnnnnnnnnnnnnnnnnnnnnnnnnnnnnnnnnnnnnnnnnnnnnnnnnnnnnnnnnnnnnnnnnnnnnnnnnnnnnnnnnnnnnnnnnnnnnnnnnnnnnnnnnnnnnnnnnnnnnnnnnnnnnnnnnnnnnnnnnnnnnnnnnnnnnnnnnnnnnnnnnnnnnnnnnnnnnnnnnnnnnnnnnnnnnnnnnnnnnnnnnnnnnnnnnnnnnnnnnnnnnnnnnnnnnnnnnnnnnnnnnnnnnnnnnnnnnnnnnnnnnnnnnnnnnnnnnnnnnnnnnnnnnnnnnnnnnnnnnnnnnnnnnnnnnnnnnnnnnnnnnnnnnnnnnnnnnnnnnnnnnnnnnnnnnnnnnnnnnnnnnnnnnnnnnnnnnnnnnnnnnnnnnnnnnnnnnnnnnnnnnnnnnnnnnnnnnnnnnnnnnnnnnnnnnnnnnnnnnnnnnnnnnnnnnnnnnnnnnnnnnnnnnnnnnnnnnnnnnnnnnnnnnnnnnnnnnnnnnnnnnnnnnnnnnnnnnnnnnnnnnnnnnnnnnnnnnnnnnnnnnnnnnnnnnnnnnnnnnnnnnnnnnnnnnnnnnnnnnnnnnnnnnnnnnnnnnnnnnnnnnnnnnnnnnnnnnnnnnnnnnnnnnnnnnnnnnnnnnnnnnnnnnnnnnnnnnnnnnnnnnnnnnnnnnnnnnnnnnnnnnnnnnnnnnnnnnnnnnnnnnnnnnnnnnnnnnnnnnnnnnnnnnnnnnnnnnnnnnnnnnnnnnnnnnnnnnnnnnnnnnnnnnnnnnnnnnnnnnnnnnnnnnnnnnnnnnnnnnnnnnnnnnnnnnnnnnnnnnnnnnnnnnnnnnnnnnnnnnnnnnnnnnnnnnnnnnnnnnnnnnnnnnnnnnnnnnnnnnnnnnnnnnnnnnnnnnnnnnnnnnnnnnnnnnnnnnnnnnnnnnnnnnnnnnnnnnnnnnnnnnnnnnnnnnnnnnnnnnnnnnnnnnnnnnnnnnnnnnnnnnnnnnnnnnnnnnnnnnnnnnnnnnnnnnnnnnnnnnnnnnnnnnnnnnnnnnnnnnnnnnnnnnnnnnnnnnnnnnnnnnnnnnnnnnnnnnnnnnnnnnnnnnnnnnnnnnnnnnnnnnnnnnnnnnnnnnnnnnnnnnnnnnnnnnnnnnnnnnnnnnnnnnnnnnnnnnnnnnnnnnnnnnnnnnnnnnnnnnnnnnnnnnnnnnnnnnnnnnnnnnnnnnnnnnnnnnnnnnnnnnnnnnnnnnnnnnnnaggtatatctatatatatctatattaaagtatataattaccttaattattctttagtttttaataatactatttaatattctagttaagattaggatatataggagattaaaggttattataaaagctttatttactatagtataatataaataccctaaattaactaatatctttaagaattaaattctatttattaataaattaatatagaagggtttattttcttattttaataatttattagccccttttaattcctatctatatctttagataggaattactttttttctaagtctctattaatactctttagattagattaattactttcttccttaaatagttctatctaggtttctattcttataatatatattctttctctttacttataatagtatatagggccttttttaataatagctactattacctagagatattaatataagtttattatatattttagtctttttactaagaaaagagggtaggaatatatactatatctattatatctatagtaatagtatctcctttcctagtatttatattctaattctttttctttaatctattttacttattttctaataaggtcttagtcctcttttctaatttataagaaagtaattataactataaggattagtaactattctatataattatctataaaggactagagatatattactttcctttcttagtaatttaaggtttactttatctctaataatagtaagtctatattagtattaatttaatatagtagtaggattaacttaattagattattaaagagattttagtaagaaaagactatatagataattaggtttagtaatctaattaaaaggaatacttttatatcttctagttaatctattacttttaaattagtaaattcttttttaaaggtaaataggaatatagtaaaagactactttagtccttactatatttttctaagatactaagtagctcttttcttaatatttagatctttataaatatcttctagatattaaaggaattcttttataattttatttacctattagtattatataaatataatagtatttttatttatatttccttctagctataagtaggtataaagtatatatacctagttatctctaagggtatcttagttaattactaatttatttttaattaataatttaaatataggctattctattctaactcctttaaaggttaagggattagagagatataactatagttatatagtttatcttatttctaataacccttaggtaggcttatttttagtcttattattcttattagattcttcttatactattatatttatttagactagctctttaagcttcttaatcctttcctcttatacttatataatctcttcctaggaggtagtagattagactaattactatattattactttagcctatttaggtagttctaattattctatattctcgtttattatactatttatcggtatatccttctatactcttctgatcttctatagaaaaggaagcttttagaatataaagggatagagctagattagaatttaagctaactaagccgtttactattatctaaaagcttaaggaaaggaaataaagcttataggaagaaacgggagaaaataggggtagtaaaggtcatatacttattatataatcctatataggctctggcccattatataggggtagaatatagtcgataactagtatttaactataaagagaaagtagaaggttaactagaattagctaataaaaaggctacccctattacttactaggttcttnnnnnnnnnnnnnnnnnnnnnnnnnnnnnnnnnnnnnnnnnnnnnnnnnnnnnnnnnnnnnnnnnnnnnnnnnnnnnnnnnnnnnnnnnnnnnnnnnnnnnnnnnnnnnnnnnnnnnnnnnnnnnnnnnnnnnnnnnnnnnnnnnnnnnnnnnnnnnnnnnnnnnnnnnnnnnnnnnnnnnnnnnnnnnnnnnnnnnnnnnnnnnnnnnnnnnnnnnnnnnnnnnnnnnnnnnnnnnnnnnnnnnnnnnnnnnnnnnnnnnnnnnnnnnnnnnnnnnnnnnnnnnnnnnnnnnnnnnnnnnnnnnnnnnnnnnnnnnnnnnnnnnnnnnnnnnnnnnnnnnnnnnnnnnnnnnnnnnnnnnnnnnnnnnnnnnnnnnnnnnnnnnnnnnnnnnnnnnnnnnnnnnnnnnatgtatatatagtagaaaaatcctaatcaattctctaactctttaaaaataataatagtctagaaaatataataatctaatagataacttagtaatcaaataaataaaataaaatgaaaggatattttttaggtaaaaaactgtaggactggtttttcgggcagaaaaccatctgagttggtttttctatagaaaaccagcctagtcagtcacgtgacccaactgtatcagggatgaaaaatgacagtattcatcctagattctgacacttcttaattaggatttaatactaaattaggggggtagtagtacataggtaagtataaggaacgtcgaattcttatactaatagcgcaatttttggtttttttttctagaattccaggtagtaatagtaattactaaataagcctccgaatcttaggtttttttaggtatattggtaggtaaaaaattggtatagaaaatagtgactatttaaaatttttgttttataagagttttcacctagctgtagtaacttggcgagaaccgggtagtagcaaaagtacgtatataccgccattacacgctagtgttttttttaaaaaaaagccaaaaattgagtgagcaaaaacatttgcaatggacctggttcgttccattaaagatctaaaatggctgtatattgaaatattaaatacattatcacattactaccccgaggataataagtatcatgacacactcactggccaacatccaggaccgaagactgtagagaaatatccgaatagggatttgaagaggcaagcataatatgcacaaaaaaaggtaaacatacaaattgcttactgagccttcgaagcctttgccttgttttcccttcggcgcttcagcgcatctggggtgtactcggtgtcaaggacataatcccaccaccggaagctgctggaatagttgccgatgaacttctcatggtggagatcgtggtgatcggcaccagcccagaagggaaggaaatggtgaagactccatgggaattcataaccactgtgagcatcaatggcctggaacaagcgcaagacgatccagatgtacatggtcagaatgtgcagttcacctgtcatcgcacaccaaacgatcgggcacccgatagtcccgaagcccaggatcatcacttcaatcggtgaggcatattcagcagccaagccgaaaggcgccgagtactggtggtggattttgtgaatagccttatagaggggtccccaatgaagtgcacggtgggagaagtaatgccaggtatcctccatcacaaagaagattgcaatttgatatgccatagtccaaagggtaggaaatgggatcgaagttgaaagtccacaaaattgtgccaaggggtggaagagcctagcatttgttagatccttagaaatccctggatttggaaagagattcgagtcttaccagatctggggtagttcgacagtgaaatgactcaagagcacgaacttggcgcaatcccattgttcccgtagcgatggaatcttgttctgcatagtattagaggtgaaccagatgaggtttgaaaaaaaaaaaaaaaaagaaattctacttacaccttgaatcttgtagcggttgaacatggcgaatgtgtcgatgaaaatccagggtagtgagcgaccgaagtagaccagttcatgcatgacgaatgacatgattccagtggccaggacatcgttctgcatccaagcataccaggctgcccacaacctctctgccacattcaggttggcattgtatttgccaatctcttcgaactggccccagtatgtccccgaggacaagactgttgaattcctatatgggatgttagatactatgacaggtcgaggatgtgagcatcctacattgcaaaggttgttctctttttcagaaagtaaagagaagcccgaagtcagaaggcagaagtcagaaggcagaaggcaggaggcagaagtcagaggccagcagtcagaaagaataaaggggaaggtagacgtgaaaccaaagccagagcgtgattctatgtaaggttataaagaaaaaaagggataatcaagaagatcaaggacagtccaatcccgacgtggcgagatcaacttttccgccccccctgaacgtaggggtaaggccactggcaagccgatccccatccgagatcaccccacctgcatacaatccggtaatgcggatttcgctgcgttttgtttggttgaaagaacacggtgactccagccaaaaatccagaccccttactaagactgtttctagacatcttacgatcattttgtttgagattttggctttagagtaaatttaaagtaaatagagtagtttgtcactccgcacgataggctcagaaataaaagtgtagtttgcatagtttgtatgtttgcacagtttgcatgcttgcccacatatattcgtgtttatatgtttgcatgtttgcatagtttgcatgcttgcccacatattttcgtgtttatatgtttgtatgtttgtatatgacgacatcccttaatccttcaacttgttcatctccatacccaggtacgatggtcagctttcgagggtagctgcacctcaacgcattgaaagattctgggatgtctgttatacaagagtgagtgtgatataattcctgaaaaccaccttgtactcaaattactttcccacagaaccgtctgtggtgtcaacactcagcttgatcgccttcagcaacagatctcaagcccacagagattggaagccacagatatatccattgaatctcttgagtcaattggccaattgcaagatctcatcaactccatttcagtgacttccaagacccaatcccttctacatcctagtcggttggcagatttactctcgggtactttctctcgcctccaagtacagaccactctccatgaagagaatagtgcccaactctcggaccatgtatggatagcagccgcaaaggctgccgttcaggcatcaggactggtcatgaacagcctcctggatcaaacacttcaactgcacgatgagacctattactggggtgagatgctggggtctatctggtatagcggtctgtatacagtccagacatcaccagggcaattctaccgctggacgaaggatgcatgcgtcgctcaaatgtatcaagaagccccgtccatcactgccagctggtttcgattctaccagattgcccgccaaagtgcctggaaacttggaggacactccattcgcgctcatttgctatccccaattagatcatcccgggcagaaatgcgccagaaacgagatttgctcctgaaaatgaaagacctccatactagcagcctgggccttctaatggaaggatggcatcttttcgaagcaagtgactccgcgactttgaacccggggactatcaacccccaatggcgtactgccgttcacagagcagtggctctgattgaagccatttatcgtcatatagcacttgagcctagcactcacgaattggaacagggagtattcgctaccctggagagggatatcgacgtcactaaaatccacacacaaggggataattccgtgcatgaacctttggacttgatcgagcgacttgtgcatgttcttcgagaggagttaccaaaccataccacttcaatgtcactatttattcatcgtcacgggcgcccttcatgcatagtccgttattggctacctgtatcagccgctcttctttcaggaagtgcatcaatgaggtttttggccaatcgacaagaggaaatcatccagtggattgttgatatcggttccaccactgtcgatttctggggcaattgggttgtgcatcccgtccgaaaactcattgggacgatcagacatgacgaaaaaagcgagattgcaataatgagcaagaatagcctgctggctgatcgagcgagtctagagagaatggtagtggactttgtccgcgatcgcccggatctttaccagggtgtggtggcggataccaccaccatcattaattctgtcaaggagggtgatttgactcccgttctcaaagcatatgaaagggacctgcggtcgccattcgttggaaccgttagaggcgacctcgtccgtgcccttttgatccagatccagaagaccaaggtcgatgtggaaattgccatcagtggtattgatgctttgctgaagagtcaggagcttgtatttgggtatgtcagatcccctcccccctatgcttttttcaatcgttaatatcttttagatttgtggggttgactcctgggattttggtttcctttgcaactatgaggtggctgggtggtcttctcggcagccgacgaggtttgcgaaagggcaagcagcgacatgagctaagacgtggattgcggtatgatgctatcaaacttgtgtataatctcacaaggctaattctagtactttatatgcaggaatgtggctcgcattttgacttcttctgcggttctatcaaacgggactgtcgcttacaaggacgccgggcaattgatatgtgaggcagaggctctccttcagcatgttaagatgatttctggaagcatgcagtacgaagagttccgagaagacatccaggatctcttgaatgttcagaatggagtggacaagcaacttcgcgtaatcgaaaggatgagatgggcatatttccagtaggttggctacatgtattttgctatactacgtatcaacatacaactaagtatcagatatgtagttatgcaaataattcatgttttctatacagttgctgtcttaagagttgggagcccagaaatgtacaaaaacataccattgcattatattcgagacttggattgatatatgtgttttttaccaataagcaggacctatgtatatacattttctaaattatataccagtgtatgccaatatgtccactgtcagccttggaagttagtttactaccaccgggcatgatgctgcttacataacataccgagatcctccttaccgtaccgtcatcacctccactccgtaggtggtgcatcgttctacctcctttcccataaaacactcaaaaatctttactcctgtatgcttggtcgtggatcactgcttgaagtctacaatcctttcatatccctgtcctttgatcagattgggcagatcggttccagcattttacgaagctcctgataagtactcgtgaagtgaaaaccatcaacctaaaccacttgatcggattcatcctgcaacgactactcccactttacatcctaaatcatttgatcaaaaccaataccccttgtcacccgacttgacaaatctccggaccacctcggtctcctatccatcatccacggtgctactactagctttggcgcttaatttccactgaagtattgccataatcgataatggctggcacacggaattatgatttcctggttagtattcatggccgtccaaaattcgacaaatttccctataaagccccaacaatgttaactttgtcatagattaaactgttgttgatcggggactcaggcgtgggtaaatcatgttgtctactgcgattcagcgaagactctttcactccatcattcatcactacaatcgggattgacttcaaaattcgtacgatcgagttggacggcaagagagtgaagttgcagatctgggacactgcaggccaggagcgctttcgcaccatcacgacggcctactaccgaggtgccatgggtattctgttggtctacgacgtgacagatgaacgatcattccaaagtaagacccgcccgctccctctcccaattatgtctgaccttttttctttctttagacattcggacctggttttcaaacgtcgagcaacatgccagtgaaggtgtacacaagattctcatcggaaataagtgcgactgggaagaaaaaagggcagtttctattgagcaaggccaacagctcgccgatgaactcggcattcccttcctggaggtttcggccaagaacaacatcaacattgagaaggcgttctacagccttgcatcggatatcaagaaagggatggacacttccaagaccgaacaatctggttcccagggcgtcaatatagaccagcaaggctccggtccgaatggcaattctgggggcaagtgttgttagttgttgtatcactactctttgtcttttgcccatgatctcccccgtcgccgtgttttaagctaccacatgtttcttatttccccccgcgctttcttcttttccgtcgatatctcgtttttgttttactcgctacattatcatgtgccaagatctgaatgtccaagttttatgcctgaagagttggcgcctatggacattcgagtatcatacaaacttgtccatatcctgtgataccttgacgtagtttgtatacttttctacccgattctataatacattgtaggtacattgtaggtataatgtagcttgaaccggacgacccacttttcttgaatctttccattatttttttttttccctctttctcttttctcccttggataatcttctttatagttacttcatctcgaagttcatgaatagacccaagattgaagtctttatcacacaattgggacaatctcgttcaatcccactgttcccctcccccgaagttgcccctcccccaccaaaaaacccggaagactttctgtgctgggagtcttatacagtaaaatccgcccatgttctcaggattttaacatacccgacatagaagagaaacagagacagagaaaacaccaatcaacttttattacaaacacatcaaggtcctttctcatatcatgtctgacgcccgcagtttcactgctcgtccattgtcaaagcagcaggcacgcaaggacttcaaagatgcattccgtgtctatctatcttcctcttcgttagctgcgctaaggcttcaaacagagagcatctgcacgctgaggcaagccgatgggccgccgcagactgccatagcatggtatgcgtcagagaacatccagagcaccgtcatgcaaatatcaaggacactgcaagactgctatgacatcaagatcggagaaaaagtttctatcaccagggctgaaggttcgctagaaaatatcgacctagtgacattggcggactgttcagatcccgagaaaattgccaaacatggctcaatttcagaaagtgacagatcccactgggaatgggccttggatgaaaagcttctccgatgcgggtgtttgacgacgggcttgacttttgagctggagctcaagggccaacctaggagttttcgagtggttaacattcattcacagaaccctcactctcgtcatacactttttcaattcacagaggcttcgaaggtttcccttggcccagtcatagaaagaaaagaagaaaagtcctcagacatagccgtgcaatccactggtcttggaggcctatctcgccaaattgacgacatcaatgaatgcttgtctgattttaacattgatctgcggaagccagcaatgccatcattctatgagaacagcagagggattttactctatggaccaaaggggactggaaaaacaagtcttctggaacagatcgaaaaggccggctggaagcaaacattcaaaattggcatgtcaactttggggagaagtgtcaatgagggcgaggttaagctgcgcaatatctttcaggaggcggctcgctctaaccccagtgtcatcattatcgaccagttggaatttattgcccctaagcgaacctcggttgaatctcagtcccttgcgtctgtcctttgcgagaatttagatgctatccgaaataaatcgattctcgtggtagccgcaacaagaaatcccaatcaagtcgatgacgccctcagaacgcctcatcgacttggaacagaaattgagatacaagtccctaccgctcaggaccgagctgaaatactacatgccattcgaggaccagtatctgccggtttgaccgacgagctagtagagatactagcagaaaagacacacggatacgttggagctgacctttttgccctcctgcaattggtctgtcgcaaagcccgacaacgacaactgttggacaaaagctccacagccatatcgaccagcccgatcgaccagtatagctcgctccatggaggttccagcgatgatgaattggccatctcattggagatacaagaaacagatatcttgctttccctgcaggaaatccgtcccacggccatgcgggaagtattcttggaaactccaaaggtgagatggtcggacattggtggacagcatgatattaaaaagcgcctccagcaagccgttgagcgacccctgaaggtgagatttatattcgaatacctgaaaacccttgccttcaagactaatttcccctttcaacccttagtatcctcaacggatgcgcagacttaacgtgaacagtaaaaagggtgttctactttatgggcctccaggttgttccaagacactgacagtcaaagccctagccacagaggccggattgaatttcctggcagtcaagggcgcagagattctcagcatgtacgttggagagtctgagcgatcattgagagagatcttcagaaaggcccgagcagcacgaccaagtatcatattctttgatgagattgatgccattgctgctcgacgaagcagtacttcgggaggtgtcaatgttcttacgactttgctaaacgaaatggacggtattgaggagctccgaaacgtgttggtcattgctgcaacaaacaagcccgatgtcttggaccctgcattgatgcgaccagggagattggacaatattctttacattggccctcccgactttgaggcgcgtagggaaatcctgcgcatctggaccaagaagtctgtggtgaacccagatgtcgacttggataatctggcatctctgaccgagggctattctggtgccgagattgtgagcatctgtgaaactgcaggagatgcagcactcgatgaggaggaggaaactcagcaggagcaagacgtgcagtggaagcatttccaatatgcactgggacaagtgcggcggcaaatcacggatactgtcatccaagagtatgagagatggagagagggctataggtaaatacctacatatgtagactttactgtataataagagctataagtccttgaagccatttaaagaaaggtgaagtgagttgaagttcgtataaagtgtccctaggtgattaccgaatcaagttagtgccaaaatgcataacatcccttccctcaaacctcctctcttctcttttctctctcttggcataatatcctaagttcttcctttttatctctttcgactttcatattccaattctccattacctagctacttcctctacatatccaatttgtaccacttgaagccctgtgatccatttagcgcgccgtgcgctaaatcttcaacatgtcctcgagatcagctcgtggacaatcacctctccgttcaccagaacaggaccaagcacggtcccgttctttacatcgttctaaacctcgaagtgagagcccatcccgaagcctcacacgaagtccatcacaaggacgtcacgatcgctatcgttcaagaacccgatcccgatccccgtctcgtggcagaacccgatctcgcagtcccagccgagctggtcgccgtcacaatagccggagcgaaagccgctcaattacacccaacgctagccctccgagaagttctaaggtaagtgccagtctgttcctgctgtgatatagctgtctcccccccatggcggaaccatatctatgaaactaaaagctgatttccctttttcttaacagatcgtggtagaaaaattgacaaagaatgtcacagaaaatcacattcgagagatattcgggggttttggagagatagagtacctcgatcttccaatcaacaaagcttgtaagactcgctttttgactcgcgattccagattcatatgtctcctaacactcttacagtcatgacaaataggggaactgcgtatatcatttattacgaccccgctgatgcggaggcagccattgcccacatgcacgaggctcagcttgacggggccatcctaaatgtctcaatcgttcttcctcgccgtaaattctcacgctcgccaccccctgcgtcgaatcgagtgaatggcggccgccccagatacggcagagtcccatatgcaggcccatcatcacccagacggcacggaggcggtcgacctacagaccgccatgacatttataggcccaagactgcatcaagatcacgatctcctgttcgttctcggtcatactcctctagatctcgctcaccggcgctgcgcagaggtagtccccgtacagaatcgcgacatcaccggcgccggagcccaagctacagcagctatggttacagcagtcgaagtcgcagtccaaaccggaaccgagggcacaatcgaaagtaaacagcgagagttttgcggtaccgttccttgttgtgtatcggttcaactctagcgggggattacgtttgatctttggtgccggcaaccgaattctatcgcaagatatccagagtagctagttctacgcaatagttaacaaattccactgccactttgaaatgtaaggattacaggatttctctaggtagtcagtatgtataataggatataccactagttaagtaatatatgatagaagcaaagaaacaggggaggatggtaggactacaattttgtatgcatgacttggatggaatgtatcacctccaataagagaaatcatcagaaaaacgaacaccatccgatgtacattgacgccagttttttcttatccgttgcttgtatgatcaattcatccacctgaccatccaccgaaagtgcaatgggctgcttagacatgaagccgcggagtttgtttcgaacatcttccaaaacgccagccggtgtgtccgggacatttacatgggtgcgccgctaggataaagagagacttgttaggaggttgcttgctgggaaccggtgttgaaatgtactcactctcttcccaataaaatcagttgttggatcatgcaaaaacgtctcgagtacagtcatcaaggcatcctcattttgtcgcagcaggctaagtgtaatctcacaagtccttctgaagggacctataccttggagattagcgtaggagtaaaactcgaggatatcttcaaactaaccattgtacccgtaagcgccaaaggcatcaaccatgttatgagtcaatcggaatggtaccacctcgggcttttcgaacgtatgacccttgtcaaagagacagttaaaatcaacatgtaggaggccgcctgttccttcttcgaatgaaaggttctcgccatgtcgatcgcccagacttgtgtagaaaagaaaactggttagcgcgatggaactctagggcattaggcgaaagcagatggagggccctcaaaacattaaatggcgagagaacatacccaagaacatatcccaccattgacatcacagcagaagaccgtgtataccttagtctcgctgtgaaccaagactctgtctcaggaaacatttcgatgaaccattcatgaaggaccggcgggagcctgcaactgtcagtacgctggactcatgggtgattgaacggaagatttacttggccagaatgttagtagtgaataagggcaactttgcgaaggttcgatcagcgcagatttcgttcaaatcatccctgatctcgtggaactattgcatacattaataccacagtccgagtattgtgttagatgtggtacccacgttcggttgaatgcctctttctcgtagcaacttgatgatgatatctctcattgtgcggagattatcaacccattcaatgagaccacattcctcattcagaggtgtcacagcgtatgtcttgatgtctgttggcgggttagcctttgtaattgcccaaagttcatcaaatcacttacacatgcgccgcttacttgattcaacgtctctttttaggaaccggttgatcatgttgttgaattccatgagacgttgatccttgcgtagatcatcttttggtttgcaaagtgcgttatagatcttcccatcagatcctcgtaggctgatcttgcgtggcttttgaagcgagctcaaaatctgtgcttcatccaaaacagctaatttcggttagtttgtctccgcgagaataggtagctaataacgtaccctcaatggttgttggatcccgaggaaaggccctgaaacctttaatatattcggtgttctgactagcagggagacttgggatcaacattgcctggaaagggaccactaatcggcatggcgcaactttatgattaaaccctagattacggccgagttggactcgagatgacttttcctccacaggagcaaggcagagttggagtagttcctctgagaactttgtaccttcagtgatcatgcgatggatttctgacgctgttgatgattccccctttgacttgctaccgtagtcctgaacaagttagtctctcataatctgtttcaggcggacgacacgtactatgatcttctgtaggcaattataaccccttttagttcgttctttattggaggacttgataacggcaagaactgtccagagaccttgctgtgggaaattatgaacagcctttgccacaatccgtgtcaacagatcatagactgtgatgttagggtgacagattctggcaaccacttgtggtaggattgtgaacagctacaactgttagctagctatccgggaaaatcacatttcgtaaactcaccagagccgcttgcaagcgtttgtcgatgaacttcttcagttgcgcatgcatctcaccgaggctcttcttgcgttgcgcttgtgtatgcctctgaaattccctagtgtgtgatgaatccgtcattagcaaacatttaccaatggccacaccacgaaactctttcttactcgttatcgcctctcttcgggtcaatgggctgttcaacaatcgaggcatgttcaagccaaagggtcagaagttttggtagagtctggaagacatatttggtcccatatgttagcgagcgaaggtaattgtcaatgacaagttttgtggcttctccactcaagctgtgtaatattggttagtctcaggtagggagtagcaggtctgatcaactgactatatctgagcttcctttcccataggcttcgctttctcggactctaaaattttgttgtaatgcttccctaggtaatagtgtgccctttcccacctgtttatccatcagaaaagaccatgttaaagcggcagtaatctaacttacttcggatacagcttgatagcctctcgatatctctgaacaatggcctgagagtgggtctggccagccctgtctgtccatttggctagcatcagatgagcctagacgcgttagtattctagtccatgtgaactgtatgcaacttacgagagcagtagactcattttgattctgcccacgaccagagagaaacgacatggcttcaatttcgactgaagaagatatattcggcgtaacttcgttggccgaaatcgcaccctctagagtctgaatggcttttcgatggtgtccatccttccaaaggagtcgcgcgtgctctatggaagccgacctgtctttcaaccgtgctgcattgagcatcgagtgatacgcttgactgttgaagttgcctttccttgaaagacgagcactggtgagccacgcagcggatatatcagaatccgcaaactcgcccctgtattccaattttagctatctatttcgtgttttgtaggctacgaactcacgctagctccattgtggctcgtcttaatcccaataggtattgtttatcggaaaggtagccacccaaaacatccaaccgtcggtctagggcacccagcaagcccgagcgtgattgacctgattgtgctttggcaatggattcgacctctgacaaagcatgtaaccgaagcatgtcattatggcatgcttgtagtgaggcaaccgaatttgtggtcagtgaccgggcaacgttgagcctgagctcgttgattttatcagtaaatgactcgtctttcttttgacgaagagcatcaagagccaagcctattccaacattgaactcttcagtgccttgtttggcacgaaggtcaagatatccctctagcttgtcccatctgctcattatccacgaagcttcaaccgcgaagggcaggaaccgtgaagccgccgactcattttctttgagaacctcgaaacgagtgagaacagcatctagataatggtgagcaagaagacagagcatgtaaaaactatctcatgtttgatctaaccttgttggccagattctttgagacaggtcacaagattccattgcgcatcgacgttgtcaggttccttctcgagttgtagctcgtaccaactctgcgccgtggcccatctcccagctttccggtgctcaaggatctgctggtcgatgtctagtgcggacaagtggcttgaaataccctcaattccatcgggttcatcaatctggctatagatgtcttgtaatctttggtatagaggctcgaggctggatctctcttgtgattccccgtgaaccttggattttcgaatgtactgttcccaatggaaaagtgccttggagaatgatttacattcaacagctcgcttagagatgatctcgggcggtattgaggacaagagattttcgacagacttgatctgcgatgagtatttgtcaatgagcgtgtcacggtttcgacctttatgggaacgactcgtatggttggaattgtgattgaggccatttaaatgctttttcttcccttgtaaccatcgagacagatagtctagcacttcaaagacgctctatcgaagaaagggaaatcgtcagtactgggaaaatcagtgaaattccacgaggattctgacctggctactgctcaaaattgtctcgcgagcattgttgtttgtctccggaatgggatgtgaaagaacactcatcaattcgtcttgaagattttgttgttcttgttcagtccctcccacgatacggttcaggactgtaaatggtaaaaggaacgaagagatggaaatatcttgacccttcacaacacgactcgatattgaaaagaccatttttgcgttgtctccattcccagtttgtagaagatcttgcaccagcgttcgaagccactcactgtgagtcaatctaggggaaaagagcggatagttaacctcagtatgattggccacaacagtgactgtataggtagatgtgagaaatggcgtaagagtgttgcgaatactttccggaagctccatccagcgttggtatttctcatcgccttgcaaatcgcgagagcgttgggtcattaccgcattcagtttgcaaaatttgagcaggccttgcatggcccatgccagaaaaccctgggccctagtattggaagcagacaagaatgcatcaaccaaaacatgctggaggaagaaaagaataaatgcgaccgtttcttccattctgtcaaagttggacaagacaagtatatccttcttctctttgatggtttcgactcggtttggatcgaggcagcccacaagccctaggcaccgagctgacaataaagtaatgctgtctgatgtggtactgaacttgacacaacagtccaacaatgacctagttaactgagcaatcacagggtctggttgttcactcagaacagagtcatggagaaattcttcatttgctgacagaaaaggggacaactccattagagcttgttcaacaacggtggcattttcgctctggcagcgacgaattaacgccagaaactggcttcgaacgtccatttgggctctcatgtcattaattttggcatcaaagacagccatctcaggaatggatgcaagggagggcatggtgttgaatgtatctcgtacaagactcgaatgattcgtcagaatatgatcgatgagttgacatgcgcggttcctgctctcgtcggtcagtttatcccaatatctgatcacaatcgctagcgtttgatcaattattggctcaaggtcctcttcgctaagagaacttatcaacgtcttccacgcggagaatgcataatcacacagttcctcgatctccagcgcagatcgaagacacgcacagacctgagatttttagtacctaaaattgattgattcgcaaggctgaatacatacttgaggcaatgcactgctaacatgaccctgggcgatattgatcatctcttcaatggctttgatgtttcttctcttctctgccaacgtttgcctcacttggaagtcattaatggcattcgcgaattgtgtgataataccgagaacgtgctcctcaatgaagtggcttagatccgctttctttgatgagcttccatgtgcaatctttcgcggaacaaacgtagctaatcgattcagagcttggttgaactgaaaactctcattagcggtccagaaggggtgggggaaaaaaagacataccctctctttcttttgctcgcccgcatcgccaaggctcttcagcaagtcacaagcaatgagaattggctcaatcctcaccaactccgccaaagaccgacccttaaatgcggggtctatgtctgctagaagagacatgatcataccctccgggttgtctgatttctgagataggaggaaagcaagaattgcagccaggttattcttctcagagcaaacatcaaaagcagactcgccttcattgcgactagccccaattctgcaaattatatctcgttttcgtgtcagaactaggtagggcaagatatggacttctgtcaaacgtaggaaaccatcaaccttcatgccaagcaaatcacatagctgttcagccatatacgggcgagattggaggtgcttgaccacagtcaccgatagggtcctccagtaaggccgaaagaggccagcaggtgtcaagaataattgttgggcaagtttagataactaaaatcagaggtgagctgtcaccatgtctgttgaaatgaagagcaaaagtaatcagaagtataatctcgggggtactcacctcgttataagccacagcgcaaatgtaggggtttggatgaccaaggtactccaagagccgaaggagaatgatgttcttctcttcatcttccgagccactagatacaaaaaattgtgagatgacatgatgataattttaggaaatagaaacgcacattgctagcccacagagtgttatgatacaagcttcctgtaatggcatatcatcttttccggaaagatttttgagccactcaagcacaacaacgaaattggcccgacgaatatcagttgataaatttgagcgcacaaaagctaccacggaatgtctatataatagtcagtatacagtgctagtgtgccttcaaggactatggaacgcacccagttgcaacacgcaattctctgattgagctgcggagcgagtgcagacagaattctccgaagtcagagtttggaatatgcatttgattggaatttggggcgtgcataagaattcttctgagtgcaatcattgcagatatccgaggaccaggcgtgcgtgtaagcctgggtaggatgaaattgaatagtgaccatatctcctcgaatccagaatgctcctcatttcccgcatgaccattctgatattgacccatatcgcatgtttgacaaagaagcgtgtctcgttttatgacatgcgaggacttcctcaaaagctgccctgccgttgcacagcagatttttcctaggatgtccaatagctcggtttttttagattcggacagttcctcgtaagatgcccttttacacaaataaatcagcatttcacaccttgaggggtatctgttgtccactcactggatggaggtgcgtagatctgccatcgttttgccacagtcagattgaagaatcgctgatatatttcccataagaaaaaaaaacaagccatgattagtaggtcctgcctctagtcctgggagacacagccgcttcgatgcccgggcatattcattcggctccgcttggtgtgaaaccccggctctctggaatgccgtatccgattcctcgtaaatttcccctattgaccctttaggtgagcacacagtcaacggtggtactgtatctagaagctgggcatgcaaggcctggagagaactctgatctggtattagctcggtgacccacctgtgctagacatgagataaagcttacccagagacacgactcaagggactggatgctggaattgtcgtctttgacattagttaacactggaagcagggtctccctcaattgttgtatcagaggctgagaagattttgcggtttctgtcaaatcgcgcaggaagcgacttagaatgacctgaacagaagacaactttcctatgttcccaaggctcagaaagccacacaggcattgggaccaagtataagtcaggctcatgtttgagagcagtccagccaaagtcgattctggtacacagcagcgatgcaaatgagtcaaatattgcagaggcacaattgcatcttccgaggtgagttgggctcctttcatttgcaaccactcgataacaacctgtctaaggcgatggaaaccattcaatacccacgagaagttttgccggaggatgaaatcatgatgttttacacaggattgcgtttcgcccttcggattgaacgaatcaagcaaccgagaggctagagagattgtctgcggaaagcctccaagggccgtaatgctcttgaataatccaggggggaggcctagactttgagtgtcctcaataagcgatccatttgcggcgggtatcgacaaccctccaaggcgtgtaccccaggaactgctacgttgaaatgtttccagagagcacaaaatatctagggaatgtcaatttggcccaaatttttacatcatcgggggctagaaacggacctgatgtgcaagcacgcaaaaacgcagcaacggcgtagcttgcaggcaatggacggactcgcttgaacttagaattagctaggcgcgcgcaaataagttgaatcttttcccggacaatctcggaggtccaggtggtggcgagtcggatcagtcgtaggattagccaagcgaataaaggagcatgtgtgtcctcacccaggatgatagggtcggagggttcccacagagcttggggggctttctcgatgctggcctgaataatatctaagcagtcgaggacttgcccttccagatcttgctctgatgtgctcccgtttgggctaatctctaagccggcctttaagacaatgcatatgagtttgttgacatcagtgacaccttcgtcaacgcgtagttgactttgtatctcactaaagatttcctcgcgaagctgggcgaatgtttcccgggttaagtgtgattcgtttccctgggttgcaagatgcggtacgaaacgcgaagcaaggatcgacgaggcaggttcagctctccaagcgttcccaggcgcggtagcctgctcattatctccctcgattgccatatgggagacacatgttcatgggaccaggtttaaaaagttcaatttctcgtgtttacacaaattccgaggccgggttgtgttcgtgtgggtgtttgaagtgcgcagatacgcggagagagttgatatgtcgattgacacctgaggcaccaagtatccactacacgcacacactctgtaatatcagagcttagttgtgatcattgaataccggtttgtaaattctatacattagccttatatctatcaagtcgagtataaaggcctgggatggtgtatggtcgggtcctctacatcgtgtatattgtagaaaatataaaagaattaaattcgaaaaaattcgaaatcgagacattatgatccaggaagtcttaagagagttaagagaattccggagtatgtgaatttcacatatcatgttgggccttgtgactcagagagttagtcaacctcactttgaaatttcaggtaccaccaccacctactccttaccctcttctaacatcacttcctaactctgagatacctcgccagtcaccgaagtcaactcagataagtgcaacatatacagaaaatatacatttcgaattggctatggagttcaagagtgactccgtaatggatgattcgagacatggatatttcatgaagcaagccttgttgatggtacgaaacttcttgatgccgggaaatcgaaaaatgctcattgaaaaaccagggcgagaaggctctccagtcaggcgagacacccgttggttgtgttctagtgtacaacgaccaaattgtgggggttggcatgaacgacacaaacagatccatgaatgtgggtggcttctaaagatcccattaaataccgctgaccatccccaagggaacgagacatgccgagtttatagcaattggagagatgctccaaagctactctaggtcggcattgcaatatactgatctttacgttacggtcgaaccctgtgtgatgtgtgcttctgccctgaagcagtaccgcatccgcagtgtgtactttgggtgcgccaatgatcgatttggaggcactggaggtgttctttcattacattccgagtcagtacatcccaagaaacgccgtcgaccgattgtgcagggctaatcggatacagctcctcaattgacccaccataccctgtctacggtgggctgttcaagacagaagcaatcatgttgctccgtcgtttttatatacaggagaacgaaaaaggtaggaattagcacgcacataccccaaccttgattacctgctgattacattgcagctcctaaccccagaccgaaaaagaatcgagagctgaatactagattcgaaaatggcaatgaagaagcgccccaaacctggtaggcggcaaggatgagatttagggggtctccaaaacatcattttactgcgcaatacctccagggctagtctgaatttgcccccgatacaagcggggaatcattactaccaaaggacatctccatataagtttgaaaagcgtcaatgttgatcagaacgggaatctgtattgtgaatatcaattgcgcccccaaaaacacacacaaaatgggatatgtgtacaaatctgcaacactgaacggaaaggctgcccatcattctttttttctttctagctgatggtgtatttcatgaagagccagtgcgctctgcctccaattcttgctcggcttgctggtagtatttggcagtgtccacgccatgctgatacaaaaaacaatcaacatcatccctcccaaatcgactcaaatggaggacttacctgatcgtggttgacaaagttgaaccatgggacaacatggatgaagagttctgagtaccgcgagttgcgggctgccatgccttgtagatgaggcgacatttgggatttaccgtacagaggctcgcccttcttgaccttatcgaccatctcacgagtatccatctcaacctccctagcattctcagtgaagccgtagaagcgctctgtgaaggtgtgagtgagatgtcatccaaaaaagcgggtcagagttcaagtggagggatatgacttacggcaggatcgctgatagagcacatgaagaccgccaagcagaccaacagctgtcgcgagtcgcataacaggagcgaagccaccacggcctacatgcgacggacttgctctctccatgatccagagcgagatgggagcagccgaggccattccgccagccacggcccagtcggaaggccgggcatatccgaacactcgtttcaaatgcctgaaaaagatataagcttgtgataaaatcctagaatccggggtaaagcgtacgggtcggaatcaatcaactgtgggatatgttagccaaagacatacgcaagcaatcgggaacggaaacagtagtagccccggttcatgttagatcaatcataccgggtagtcagtattggcccgcttagagggcacaatggctgttttggtatcggtcgccatgttgcttgaagtgtggatgtgcaagcattcgaggttgaagttctgggagttggaggagggcgaagctaaccttttggggactagcgcaatcaaggcggacaagaggtctgacagccaatcagagcgcatgtaacaggctactcgcgtcacgcgtcaaggtcgcatctgattgattgacattgaatttcaagatagcatcccataccgagtacgccgtacacaaagtccaactgctccaatccaacagccaggtttttcttttttctttttctttttcgttcaccttcagttatctggtccagtcaaatcgatcacttgatatagttgtacccacaacggtacctgcacgcgattagaaatatggcgaacgcgaatgtttcagagagaggaagctcaccaacagcagatgatttgaacgatctgtttgattatgacattggcttggatgagattattccggataataatgctcccaataccaacagcaccaaggcctctgggataggagattctgcacttggtttgggtcttgatgaagaagtcaaagtcgcaaagaaacgacaacctgtggctaaattagatgagggccggtgagtctcacttgctaccttctttcttgattgaaatctgttatttttttgttttgtttcgggagagcatttggggctgcaacaatgctgacgaataggctagtttactctcacaaccgggcatacccaaactacgacatactgctagacagaagctgaaattcaagggcaaaggatacgaggtttgttctcttgtctatccaaaattcctaatgcatggctagtgtaactgacttgagttcgctatagttcaaagacgccgcacgcctgctcaacttttaccagttatggctcgatgacctatttccacgcgcaaaattcgcagacggactgacaatgattgagaaactgggacactctaaacgcattcaaaccatgcgacgagaatggatagacgaggagaagccgagactgttcgatagctctggacccacgcgagaagagctcgaaaatcgccacgtccccacggaccctgcagattccaatcacaacccaaccgcgattattatgggccaggaagagattgccgaccaagacctatttattctagatccaaacgagagcgcggcgcctactgtcagctaccccgagcccgaggacgatgacttggaggatcttctcagagaacaagatgagccaatgtcagattttccacccgacaggcgtatctcatcttcacgagcaccagatgacgataacgactatgatgccgaatatgaagcgatgaaggagcttgggatgtagttgtggaaggcattttgtacgatgagtttttaatgacagcaatggtatatgtttaccccgggataaacccgctggttcctgtttaatcgtttcgtttcggctatgtagggctcagcttgggattggccgaatgagtctgaaactaaaattactaggaataccacattggatcacatttaaggaaaaagaattaatttcaaataacatgctaactgagtagaataactggagactgcaaagcaactcttcatgtactgccccggaaacgggacaagacgaagggagagaaagagacattagatgttacagtaaaggatgggccaattgaatatattgatctcacgcgctggcaggctccgtgaacacagagaactgaccaccggcacccgcccagttcaatttctttccacgagtagcagtgttatcgataacagtagccacctcgatgtcatcctgtgtaccttgtcccgtttgataggtagcagagaaaccccatgaccatgcacggccatcggaatcgatagcgagagaatgatccgaggcagccgccacaaccttggccttgatacccggaacaggggtaggcgcgatcaggatacgggggcgatcgcgctcatccttgataacggcgtcatcggaaagtgtatcgatcttaaggccgctttggaaaccgtcaagacggccccaaaccaagcattcaccatcgccagcaatggcaatcgaatgatgagcgccgccgcagatttgtgaaatatttttgtcagaaagtgattcgacaagagtgggatgcacgatagcagcttcatcgtcgccagcgccctcgcggagggcggttgcaccgaagctattcaatccccaggcatagaccttgccagtggcgtgaacagcaaacgagtggtacgagccactcccgatgtggacgatgttcttagggagaccgaactctcggggctgaagaccattcagcctgttgcgctccacgatcctgcgaccgagctgattctgttgtcctgagccccacgagtagacgcgaccttggtcgttcagggcaagaacgtgattagctccgcaagtcaggtgtttgatcttcttcaaagacgagatcaaagttgggatcgtttgaacgtgagaagacgcgtcaaatccgaggattccatcgttgctctagaatcgttgtcagtaaaagcaaagtaattcaaaacagtcagttcgtcttactcggaaggtgccccagccatagactagaccatcatcggtcaaggcaaagcttgcgctatcggcggcggcgacttcaacgaagacagtgccttcggggaaagcggtgacgggaatagcagtgggaatagactcccgggggtttaatccactgtcttcatcatcggaatcggaatcgctgtcgttctcaatgtccttgtatccaccgtcccattcagtttctcttccgagcgcaccctgatcgttcacaccccaggagaatatcttgttgtcatgcgttagagctagacagtgcatgccaccgacagcaacctgtacaactccgacttcttcggcagacagaagcttattcaaacgtgggcgcttcacatcgataacattcttagctgtgcccaaccccagctcaccagagctaccctcaccacagacgaatacattcagtttagttttcggggcctcgttgatgataactttgactttcggctttggctgacggggttgcgcgacacgagatcttttgatttcgcgaggtttctcctcatcttcatcagctttgcgcttcttcgtagcagaggtcaatttggtagatgttgccattttgcttggcttcgcagttgacttggtagatgttgcagtcggcttcgtagtggactttgtagtggactttgcagtagcctttgcagtcggctttgcggtaggtttttcaatggacttagtggtggattttgcagctgcctttgtagactctttcacgggggtttcggcctttgtcatagtgatctgcctggcgctggtgcgtagtcgagtacttctctttaccgtctcggttgaagcctcgacgggcttggacgtgttcttcttaggaggcattttgcctcaaactgggctattagaaatagcaaagaatgagaaagaacagggggtggggaggaatgtttgagactggaagaataaaagggaaaaggtatgtgaaggggaaaaaagagaaaaaaggacgccaagccaaaaacagccaaacaatagcacattctctccccagccacctcaatgggctgattcattgacattcgttgatttttattgatgattaacgcgttgttacgcgtgaatatgttttctttattgatctatctatgaattgaagagcattatagaattacaatagcccatcactgcatcaacggctggtttcttcacgaatctttccacacataatcacattttgtcccaatggcatccatttaacttctcgaggattcaacgcagcattgggtgtaccctcttgatcttgtttcgagtcagggctgacattcactccaccacggcccaggtaggtgggagcaaccgtgacaataatcgagtcaatgaagcttgtatactctggattcaacaattcactcagaaccgtaccaccgccttcaatcatgacacttttaatgccctccgatgccaaggcacgaaagacggcttcccagcgtaatcgccagtgttgattgtattctacaatgcggagaaaatctccaccgtagcctttgagcatcactagtgtctgagggttgatttgagctcctggggacaacacaacccatggagctttgccttttccttcaacggcagtacgtaacatccggcattcaggatgaataggccatcggcccataggatcaatgatcacgggccgtggttgccacattctccccaggcctccaaatccaccggccccttccagacggcagttcagacctggattatctgcaagaacagtccctactccaacaagaatggcatcgtgtcgggagcgaagataatgggtcatcaatttggcctccggtcccgacaataccgtctgcattcccggttgaagagaaatcttggagtccatcgacgatgcgtacgacaatgtgacatgggggaactctcggcgttccgagtgattaggaagataaggatgtaagaagtctagcgaaaactgagggaaggatagtgtgtccgggggcaaagctgacgagatcgaggttggttttgtttggggtgacacctcgttgacaccatcggtgctttgagttttaacaataccatggcccttttggtattcgtagccctcgtgtgcgaccagattcacctctgggttttgtatacgccacttggcggagatattgcggacgtccgtcacagtgaagaatcgcccgccagcctcaccaagcttatctggctcttcctgaaacttggtgtaaatggaagaagggagatatcccttcacagattctttgcgcgcgtactccattaatcccgagtttcgcttcactcggtcgatgtagtcgaggtcatgtgagtggatgctgcaactacccggcgttctcgcgatggtgacggtcgagtatgcgccttcaaaccggacaaccttgatttgaaagttacagatgcctccctctcggactcgctttttgcgagggcgcttgccttctggtaaggggcgagtttcagatgtgcggtgtgttggacgccgtaaacggcacatgtaatagtcggtggtgcaatggccctctttgctcgcatttgatctttgtttgacccatacattgtctataaaaggccaatatgtttcaaattcttcgagactgatttctatcgggtccttgcactcgaacaggaccttgcgtatgcgtgctaggttcggtggattgttgaaaaggcttggggtagccttcgcgccttgactcgttgatacgctgctgctgtgagcatctccgattgtcgcattgcgctgtgttgactcgttcccgtcaccgtgtaatgcttgtttatcaagggcaccggataaattgatgggggttgtgatttcgggcaggtcttcgtccgttgcgtctcgtgtatcgcaggcccgtccgatctcttgatctgttcccagaacgtctttcgcttgcaaagagactccgttgtgcggggatcccgcctcgctgccagaagcctctacgctcgagacggacacgtcggaggcatggtccatcctgggggagcgtggcaaaatatagctatagctccttattcctagctatggcgacaaatggccatttcactgcggagtagccctaaatagacacacacatatatatatacacgatatagagcaaagtgtcggagaacgagcctcgggaagaacttagtggggcggaaacatgaaggcccggagatgttatccacgttctgaggtcgagtacggagtatacatgtagtatatcaacagccaccacctacatgtaccaggggaacatagtccacagattgattcggtcttagaagtcaaatagaaatccataagaaataattgatcattgcatcttcgcttgattgtattgtcggagacaaataagcacaaaataagtattccagtatctcagtatctcaaatcacatctaatatgccccgatatctgccccagcacgagccagagtctcatagacccgtggtggcaatttgtacttgaccattcccgagaagaccatgagatccttggccatgacaagcaaagtatccgccaatccctggcgcacttcactgtcgtaaactccaaaggttcgtttttggcgttcatagccaatacatgtgatgctccacatgatgacaggtccgatgttgcgtgaaatgatgggtggcaaagacgaaaaagcttgggccgtgcttcgaatgtacgacacggagccctgagcttgcaaggggagaatattcaaagcgttgatagcctgtaacgttcattagtaattcaatcatgaaatagaaccatgggttggagacacctacatcaagagctggcgcccatctgccggcttcaacctgagtctttgcttcgatcatacgcaacagcaacccacaagcatcacggttgacctgtcggatttgcccgtaatacattatgtctgagtcgtaaagactgatcatgttcttggcaagcacgcccggatcatccacggtagtcaaactgaggctgctcccggcttccactgcctctggctggctatcttgattctggtcgacccttgggcgcaggggctgcagtttcggcatggcaccccctagttcaaccgcgattgcatctgacaatgcacggttgatgatgtcaatgacacgatcgtagttctctgccaagtggtacagaagcacggcatccgcgatcaatcccttatcatccgccacggcagcagcttgaacggtaatagtcttcaagaattcttgctggtcgaccaacttgatcaaatcgagacgttgctcaatggctcccttgaggcgagtaccgtccgcccgaatatcgccaagcaatttggcaaagtccctggtttctagaatgaactctcgcaaggcctcatggcagactgatgcttgggacttgcccagagcgcctggaagatctgcgttgaggcagatcagtgtaaagtaatcgatggcagcttcgacaaatccagtgcggaattctcgggtgtattgggtcaagagatatccgaaattgatctgggggtattgcttgactgtaaaggaaactgcaaagggagaaaattttaggtcagcaagatcataatatcatgacagaagataggcttacgaatttcttcaccagaggtgtaaaagtcggaaacgcgcaaaagaccataataggatagggcgatggcaaagtgaacagcagtgactggggcataggtgccgagataatgcacagcctgctcaaacattcctcccaatatctgcagcaggaagtaagttccatagccaccgggtccctcattgcccttgatgaagactctttggccaatttcctggatgtcggtttgaatatcctccaggccgaagacatcacctgcaacctcttcggcgcggtcatcctctcttgcaaggctgaattgtagccacatccagtcctcgacagtctgcttaacaccatccaagcgacgacgggatagatcacagcggccaattatcttgtagcacgccattcggtaaggatcgactgtattttcaggtgcgttccgcgatcgttgctggaactcgccattgatcttttgctgcaagtccctgggcagtctcctactctgcgcgtaggttgtcatgtaggtcacaaatttgtgatctaaagaccggaacccgctgtcccgactcacgtattcagcagcctcagtgacaaagccacatcgaagaaggtagaagatgagaatccagcagtagtcttggttcaccatttggagctcggtgccgtcaggtgccagatccttcctcgcggcttgaagacggatgtaggcgcgaatcttgttgatcacggttggaattcctcccaattgtgcttcccgtggatttttcgcaatggcggtttccacttcgtcgaagaatgtgctctcaaggaaacctctcgaaccttcaaggatctgtttcttgagttctactgctttgagagatttggacgattcttctagataatcttcggcatactgtcgctccttcactgctccgggctccgatggattcatgatgtttggcttctcgtgaacaattcttatcaaggcttgatatgcgttgaagagttgccgaggtacctagaaaatgattagctgggacaaagatacaggttgcgcgaaattttgaaacttacatcaccaccagcttgcacttcaacatatgagaattcgtcgagtatgggatagcattttccctgaagtctggcgaggttcaactgttgaaccttctcggcgtagtggcccatcttctcacgttggaacctgagatcaggcgagtgagccgcagttccctcctttcgctcagctggatcctcaaatatttgacggcttgccaagccgaccccaggtgtgccaatcaccgacttctcaagaccggaacgtccgaatacgcttctgcgggatgccgttggaggtccgttggctgaagcagttccggtttgcttagactgccgtgttgaacgcccaaaggcacccttggtggtagatttaagtcctccagcgccggcagcatccttctgggatagcccgaaatgatggaatattttttgacgttggtcttcccagtccatgtccaccttctcctctaaaaaagcatcgaagtcccgctgagctctggtgagaccctctgcgatcatgacttgtcgaccacgttgctggatattccgcaaaaatctttggttgtctgggtcaaagtggtccatttccctcgctggagctgctagagatgcctgggggtccagggacttgaggtcgcgcaatgcttgtcccggggatacgccggaagctgcgagaagataatgactattgatggtgccgcaaggttagtcaaggtcaataagaaaacatgcgacaagatggaactcacgctttgctgttcttgccgtttggggtatccttttgtcctgtagagcctagctctcgcgccttccttcgaatgtcatccaggcctaactggagactaggcacgtcttcgaagttgttgttttgaaagaccgatgacaatggtcgcttttttccacgttctaataggctgttgaagaacgcaggttgtgttgactgattcgcaggttgtccctgggtctgcaagttgctagcttgttgtgtctggcccaaggtcggggcttgagcgggatgttgctgggcctgagatccgaacagagacgacgtttgcgcgccttgcgcacctggagcagaaaattttgcgaaaggacctgccgtctgattgtttgcgccaaacaggctgtttgactgtggggttgtcgaggctccaagaccccccccgaagagagagccagtgttgaaagccatggagggctggtaggtgagaaagctttgagaaagaagatctaaactaagattgcagaaaaactattctttgaattagttcactttgagctgacaattgagctgacaattgagcaaaatgatgctgatcaaagggcaagaaaactgcatacctagggcttcgtaacagtaaagaattaccacgataagtagtggattttctcggacttctgatagtaaggaacagagcttcagcagagctctgcttttatatggataaaaaatagccccgcaattaagagtcaatagattgtcaataggcaattgaagaggctgtttaggaagctcggtctaaacaattgtatcccggatcatcgattgaccgattgaccgaaatcctattgttcctttatttctcaatgaccggaaccattgaacccattgaacccaataaaactcccattcagtcctccactcgataatagtgatccatagattgattcggaaatatgcctgtgttccaatccaaaacctttcgtcgggcagctacggaatcatcgtccctcggcgaacggctcggtgcgttctaccgggcgcgactggctcgacaccctttcattctcttcggacttccattcatggccgttattgtagccgggtcatttgccttgacgcctgctgctgccctacggtacgagcggtatgaccgcaaagtcaagcagctcagtcaagacgaagcatttgatctcggacttaagggtcctgacggggaagagggaatcaaacgcaacccacggaggaggattataggcgacgaaaaggaagaatactacgtatgtattgttttattgtttaattaatcctgactttcttgtctgacatttggactgaatgctgattattgtatacgcttacagagactcatggccaaagatctcgatcaatgggagcagaagcgagtacagcgattcaaaggtgaaccggatggaaggctgtaacactttgaatttaaatatccgagtgcatcctcgaaggcgcggaaaacacgttttcctcgtgacctcacctggcgcatgagctcaagcctcatcgctaggtgtacgttgccgtacattgctgtgtggagatgaaggaggagctcagggggtgcagccactcgattatctggctggccttcgcgtacgacgtatgctatgctccaatatccctacttaggtagccattggaattggtctcgctcactttctcagcctctcggaagttgtatacaacatacaatgtctatgcttcctggatcctatatactaggccattgactgtggaattcggggaaatatatatttccgcccctctccagtctgttgcctcaccttttctgtatggaggtgaaacctgcatgggtgggaccactccacggttggttggtcccttggagccttgcaactaaccgggaactgggatgaggtcattgttaatattgattcaacataattcagtttatgaatacaccgatatacaaagtatatattgatctataatgaaaggagacttactcggccagatatagctactaccgggctcccaattatctctgtagtgtgagctacctctatatatatctatgtatacagcaatcactatttaactattcgtttatcgggaatatatgtactatatatagtgaaataaaagcgacctacaaaaaaaaacatacaactacgtcaggactgaaggtgaacccgtgatcccccacacaataacgtcataacttttcttctcgaagcccccaaatttcttcttcacccatttcctctcaactcagggctagttccaggcgattattaatcatgcaataacacagattctctctctgatatcagacctgttcatcccccactatttggcatttttcgttccattggccaccgattttcttctttggctggaccctggtctattcgcttcttattgcccctctttgtctctcgctacgtcagttgcgtatatcgtgaggttcttccatctgaagttttgcgtacgcttcccttcactttctatttgaggaacaacatcggtttcaactttgtgtattggatgccatttatgaccagcgattctcttcgttcctaggtcttcaaaggccctgatatcttggtccgagagcttgggagcacttgtcagtctcacccttgagcagccgcttgcaattttctgatacgcaactacgggtgtcattgtcagagagttttgagctgactgtgtttcctcggaccagaaactggagtcgtggaagctaagctgcctgccatgacaggccctggacgctcaccctcctcgccatgggtacaaagtgcacaaggtggtcatcatgatggtggtgtcgcacagtctatccagtctaccatgtccccaccaaccacgggcatgatgtcgagcacggcttttacagaaaaatcaagtcctaactattttggtatggctgtgcaaaaccccaacaatcaacagacttccaacccagggctgtccatgcaaaataactggggcacattaccccatacgcaacctctgccgagtccgcaattaccagtgttttctcaagaatcagtatcagcgggattgaagaatctattgaagaccgagcctgaaactagccgcatacgccgagaatcagcattgcatggatcttcttctccccagacgacttcgtggtcaaagtcctcatcttcacatccgttgggaaatttctcattcgcacaacccagtgaactgaggcttccagccggcaaaaacttagcgcctactccacaaggtatgaaaagtcttagatttgcttttggttttttttttttgtttgtttttggccctataacttcctgatgtgttccactgcctatcttttacaaattatacaagacctaacactgcttgtttaggattcactcccgcttcatttccttgggtatcagccgaacgctgcgccgaacgtcttgaatcatctcagtcaaatactatgttatttgatgttcgcccatttgctcacttcagacaggccaatatcaaaggatcactcaatttatgcattcccactaccctactcaagcgtcgatcatttgatacccagaaattagagggaactttcacagacgacgccgataaacagaatttcgctcgttggagaaagtgtgacgtgatcattatctacgattctgccgcagcggagttgaaggacgcagcacctcttctgaaccttctcaataaatttcaggctgaaggctggaaaggagatgggttgatcttacaaaacgggtttcgaggtttctcgggtcggtttccacatttgattcagcagccacagacacagacgactggatcatcctctaaacgcccctctcccatgagaatcaacctgcaatctgttgctcctgtcgtgggtggttgcgccctaccagaatcatcctctgccgtcaatccattctttggaaatattcgacagaacatggacctccttggaggtgtcggacaaattcctctgaagcagcccgatcaattgaccgaagcaaagcgacagcaactcccttcctggttgcggggcgcttccgatactaaggaccaagggcacattgtttcgaacaaattcttggttttggagaaaacggaactggaacgcatgaaacaggctttaacatatgaaggaccttcaggtgacaccaatggtagccccaagaaatatcgcgtcgcgggaatagagaaaggcacgaagaatcgttacaatgatatttacccatttgatcattctcgtgtccggctcgagggaattccagctggtgcctgtgattatgtgaatgcgaaccatatttctgctgaacttaccaatcggaaatatatcgccactcaggctcccgttcctgatacatttgatgtgagtagcagttcctcacaatgcttgttatcatattgctcacaatatccaggacttttggcgcgtggtgtgggagcaagatgttagagttctcgtttccctcactgcagaggttgagcgaggacaggtgaaatgccatcgatactgggagtctggaaaatatggaccatttgaggtaaaggcctattcggaaaaacatatctacatcgaacccagagttggcagtcccatgccgtcgaccgaacggcctgatggcacaaacgaaaatccagtgatcaccgtgcgaaacttcagtatctgccatacgtcattcccttttgagccgcttcgagatatcacccagctccaatatccttattggcccgatttcggaacaacgtcacagcctacccatcttctccgcctcattgagcaatgtaacaaggtcattcgtgccactagcaaccccagctttagtagtgagcaagcggaaccaaagggtcagcggccggtactagtgcattgcagtgcggggtgcgggcgtacggggaccttttgtactgtcgatagtgtcttggacatgttgaaacgacaacgtgcgcaggctgctggtggtggaggcctggatcaaaatcctagcggatcttccgagtggatgggggatttcactcttgacctaattgcaaagacggttgaggatttccggagacaaagaccgagcatggtgcaaaacctgagtcaatatgcactctgctatgaaagcgtgcttgaatggctcgcttctgagatggactagaacaagtccttggacttttcttcttcttcttcttcttcttcttcttcttcttcttcttcttcttcttttctcttgctatgatgacgaccctgggatacccctttctggccttgcattattaccagggccatggttttcttttgatctatgtacaatgtcatacagctagtggttctgcattttctggtgtttgggattgctttgggacaggggggaaaatggacacagctaattttcttgggtcttattgcgcataagagacaatggtagcgtcctagtctgatgatattcaagaattgcgctatttcggttacaatccactgctttgaagagggcttataaccacagttcaacagcctgactttcatatcctgggcaacagaagtttatcaagctctttgtcggagttgtttatgtactattgtaatgcccctagcgtttgacgggccgcttgccttttccactataaccgatattcaggaacatcactccgcgatcagtaatcgcaaccagctcgtcctcattttcagtgaaccgcaattgagagcaaacggcctctaaatgaaggacaactggtcgcaagtcgatggcacctgtagacgattcccacgatgatggataaaagccggtgctgttctcttcaatcaattccgacggattcaatgcccagacatagagggttttccagttagcgacagcaacacgagttccgcgacgcgaagttgctaccggagatccatgcgaagttgttacttcccggaatcccccaagctgcgccacaatctgccaattttcaaagcgccttccgcggtcaagattcaaaacatgggtacaccgcggaccagtgtatgattcagacttgagtagacatgccgcagtccatttttcaacgcggtgggtggcaatgccgaaggcaaggtactgccaatgacagtgttccccccggtttatatcgccgagctcatgagtaccgaagaatggtattccaattgagaattgaagcgagagggaagacgaaaactgcacggtgcatgcattcttactaacatgcggctttggctcgcctgggggggcagggatgcgatcaagtctctgaaaggcaccgtatatgttttgagctcggtagtggtagagcaactgaaagcctcgatcattgaaagccaatttcattacgggccctagtccccgcgaagaacggacatgtgggtcttgatcgttggagcttgtcagaacgtaagcctcaaaaccagcatctagagatgtcagaaaccagttctaatatgacagaatgacgaaacgaacaagtgattttacagggattgtctcccttacttccttctgtgatgccttcgctagaatcgtcttcatcttcgtcgtcatcgtcatcgtcatcgtcgtagatttcggtataaagaaccacgtcatgatcaaaggggtcgagcgtgttttgccatgatattgcaaatttgtcgttggagacggacaaagccagtggcttataatctcggcattcgggaaagtcatacaatcgaatggtgtttgccctggaattcaagcgatggttggccaggtgaatactcccgttggggcaagacttgagggcgtgtttaacaaatgggtggtctgtatccagctcttggtctaagaatggtctgaatcggtgaaggacgtagactccaccgttttcaccaaaggcagtctggaggatttcaacctccccaagatcctgtcctggggatttcaatttgacttcggtccgatccccatcgctcatgtcaatcagatggacggtgctatgccctttaaagacaagtagtactcgaatgctgtcttctgatgcctcaattgtcgatgcatggtagtcaatcactcgattttgatactcataggtggggttggcgtaatgctctgccccatctaactgttcatacgagcgcctcattaactcatcaaacagatgcctagtctgataagcttcaatcccatcgttccaaccaggagtattatgcagctgatgaatgatgacttctcggctgctggaagcaatctcataaagcctgcggcttgaaaaggctgcctggaagtaggctggtgtgttgcagctccgaagaaccagttgtaccaactctgtgggaagttggagcagcatatttgaggtataatattgccctaggtctaacatgagggtttagcatatacttatagagcttctgtcaaggcacggtgcacagactttttgttgcctcgtgggtctaggtagcagcgccaggtatggaacaggcagaaggggagaaaatgatgaaatgaggaaagacaggaaagataaagacagaaacccttggaagacaaaaaggtcgagaattcaaggtatcactagcggtttcagctgtttacccgtcatacttctgaaatatgatattttgtcttttctctccgccttgtatatatatactagtacacaggccccctgcaggtccaactacggggtgtaatatacaagaatacacgaatctttatgattggcttaagatttcagccgaaactggccttcgcaagacatgtagccagataagtctatgacttggatggacttctagttgaaattgtgtcttcgcaaatagcaggctggcctgttcaaaagaataacggcccacaaagcatagttccatccagttattatttcaatataggtaatatgatgaaagaccgaagctcactgtccttctccgccaccgcccgcggacatgctgaggaacatgaggattggaataacccaccagtacctagtttattgattagcgcacgaaagcaacgatagaagtatctgtaacctacttctgcaaaatagacttttcttcaggttgctctgggttttggccatcgggcccaacaatcactggcctgttcaggtgaggctgcgtcccggattcgttcgagacaagttcaatttgaggactcgatgttgagccctgagcgctagtagatgcagacagggagacagtgtagacttcgttggttgggccgagatgaagacgaaacgttggttgctcactggccgttaaagaggacaacgacacgagactgccaacccattgctttttgtttggggaggttgaagtgtagagaccaacacgcacgagattatcgcgctggtcatcttttggggggtgatatgagaccacgtccgatttcaatgaggttgggtcgtaggagatgctcgcgaggacggacggttgtggcgactctaagggccaatacaggatgtcggtcgagaaggaggcattggcgacagaaattaggagtaacacagcgctaaagatggtggataggaacctcatggcgaagaagtgaattatagtgaggagacaacctgagatgtcaacggtttggagaagaaagtccgagctccaaccccacgagtacataagctgtacataagctgtacataactatacatgactatacataactagtcatacagatgaatcccttacgatccttgctatatacatattcgaaattcaaagactaataaaatatatatatacgatatgtatacacgtaaatgttcttgtaaaaacataacataaaataggtaaatatcataattttacacttacctacttatatggtacatgaagagtacatcaatcaccgtataaaatagcgggacattcaagtattggtagagtgccccgaaagtgcaggtaccggctagtactgttccgtcagggcggcaaattaatgtggtcgtaagttcttctcctcacagttcaccttcaattctcttaattcaatatccacagatataaacagtaagtctgcttcgaccagtctatattccgtgttttgcgactcgctaatccatggttagtagcaatctatagctccatagctgtcaactcgaaagggaagagctactacggtaacatggcctcgcggaaggcatccaatgaccctcgggaggatctggcagttcatgtcgaccactatattggcattgatgtcggaactggcagtgcccgtgcctgtatcatcgacgacaaaggtgatattgtggggttggcctcagagaatatcggtctttggcaaccagagcacggtttctatgtgagtgcaactccaaggaatttgagtgccaaatcagtcttacctagcctctaggaacaatctacctccgatatctggcgttgcatttgtgtcgctgttcagcgcgttattagccagcacaatatcaatcctgacacggttcggggtatcgggtttgacgctacctgctccttgtcggttttctccaatgataccgacgagccgatctctgtaacgggccccaatttcgactcggaccgcaacgtgatcttgtggctggatcatcgcccagttgaggaagccgcgaagatcaatgctaccaaccacaacctactccgctatgtgggcggaaagatgtctattgaaatggagattcccaaggttctttggctcaaaaaccacatgcctaaggagctctttggcagatgcaagttctatgatctgggagatgctcttacacacattgctacgggcaatgagaagcgaagcttctgcagcgtagtctgcaagcagggatacgtgcctgttggtgtcgatgggagtgtcaagggatggcaagaagatttcttgcaggacattggcctgggtgacttgaccgaagataatttcaagcgtatgggcggagttgacggggtggtgagcctttccctaaatgacgatggcgcagtttactgacttttggtgccacacagaatggtgattatttaagtgccggtgaattggttggcactctctgcgatagggctgcagccgaattaggcctgccggctggtattgccattggcagtagtgtgatcgacgcctacgctggctggatcggtaccgtcggatccaaattcgacatgcacccaggccaatctagcgcagatgtccctaaacttgatatatcggaggccttctctcgcctcgcagctgtcgcgggaacctcaacatgtcaccttgccatgtcaccagacccggtttttgttgatggtgtctggggaccatatcgggataccattcttcccggatactggatggctgagggtggccaatctgccacaggagaattgctcaagcatgtaattgagactcacccggcattcaaccaggctatttcgattgccgagtcatcccatgccaacatctacgactacctggataagcatctcaaggagatggcacaagcccgaggaaccccatgtgtatcctatctcggacgccacttcttcttctatggtgcgtctgtcttcattgttagcattgtttaggttctggctgatttcgttgatgaattggggtttaggtgacctatggggaaacagatctccccttggcgatcctaacatgactggatccgtctttggcctaaccagtgataaatctgtggatggccttgccatttactactacgccaccatggagttcattgcgctgcaaactaagcagattgtagaaacaatgaacaaggcaggtcaccacatcacctctgtgttcatgtcgggctcacaatgccagaatgacatcctggtcaacctcatcgcatctgcctgcgatatgcctgtgctgattcccgagtacatccatgctgcggtatgccacggcgctgctatgctcggcgccaaggccgccagcgctgattcccagggcagaacccttgatctgtgggatatcatgaatcggatgagtaagcgttgcaagcaggtgttgccgacagaggataagaacgagaaagccttgctcggcgtgaagtatgaggtctttctagaacagtgctggaaacaacgaaaataccgtgggatggtggatgacgccgtgggggcctggaagtccaagtccacctaatttgatatcacgatcacgtcggttactctcttttcaatcacaaaaacgagaagatatggatactggagtgttagttcacgatttacaaatcgggtatacttgacatcagtcattaccgcatactaaaaagtatgacaatttcgaaatcataacataattattgcaaaatcatgcccaatgcatcgagctacagagcctatgtcatgaggaaagtcaagaacatgagtcacacactccatataaacgtcaagcatataaacaaaatcccgaaaaaacattaattcagacaagccaatgaatgccttgtgctgaaaagcaactatcactatgcaatatgtgcactttgtctagtaggccaccccgcctcttgttcggccaacagtgtagaacttgttggaactactggtgctgcctatggctagggtatcaaagcgatccacgcccatactgtccatattcacatagcctgacatatggaagccaagcacaacgacgaggtaggtgagtacaaggatggatcccttaaagtagttgctctttccttcgccgtatacatgcgagagaaggaagacgcacataataacggtaatcatatcccactgcgggaatattaggctgttgaaatattttgttagccacagcatttcgattggagacataatgaaaaaaaaaaaagaaaagaaaacgaaaaagctatcttacttgaatgagtggctgacaagctcagatgggtctagcgagcggccatagaaagcgctgaagaataccacagcaggaatctgcaatagacagacctgtagtgcataggcagacccaatttccatagataatgcaatgtttccgttcatggcaaatgagatggcgttctgttaggtgtgttagctaagaatatcaaatgcaaaatcacctcagatagggccttcaatgaccaacgtactaggaactccgtcgtatttggcaccaacgcgaaaagagtaatgccgaggaatttctcatcaatatccacgctctctagcacaacatcaaccgtgttgacaagaatttcagcaatcactgcatagaggacagttgccccaagaagaatgacagagcttttaactttgctccaattaggtgcatcatgtcctccgctagaatgagtgggctccacactcaacccgagatcttcaagctcttccccaggtgtatttcgtgatcgctccggagcagggcggctagattgacgaacagaggcttgatggtgttgtacattgggcttgcgacttcgagccgtatcccgagcagccactgttgctgctgttgctgctacttcggtgaactggcgtactagacgctcgttgtcttcttgggccatattacggacaaactttggcacagggtaaccgtcctcgccgctaggattggggggcaccaagtgtgggaaattgcccctgaggtctgcggcttcacttccagccccttcccaattgccagagtcattgtcctccaagccaagatgcttcaatgactggcctaagattcgcttatacagctgagattcacggatcgaatctttggacccagaagcggcaccagaagcttcgggctggccatttgggaacatgtgccgtggctcgtagaatgattcttgggcagattgggtggcatgggcatgggcatggggatgggaattctttttttcttccatctctgatgcccagataagagcagcgtgggtcctaagagtaaaccataggccgatgccgtatgaaaggaacaagaaaacagcggcgatccatgcatatggctgtaccgctttttgaaagaattgatcatcgacagccgctgtttgtgagaaatagcagcgcctgcaatctcgagtctctggatcgagggaacttacacacgagtggcagttcagctcatgctatgcaccagtcaacttaggttcgtttgcaaaggaaggtgaaacttacactaccataaacctgatagaagagggtgggaccaaaggcagcaataaccgcaaacaacaacatcgtcgaggtcacaccagctgatttcacattgaaccgttgggtcttgcgtttgagtgcaccaaagcacatggacaaaccagggaggaataaaatgccgacaaagatactgccgatgatacttccctcgacaagctgagccttgccctcagtcaaagcgacacagtagagatatacttctacgatagttgagaagaaagcattgatggcagcacctaagcccatagaagattgagcggagatcgaggcgacggcttgtccaatgaaataggccagaggaataatggagagcaacgcgagagggaagatcaaggccggatgtgtgagccaattctgcaagcctaagaatttgcccaaaacatggtagtcgaaaatcacaaacacaaccacgccaagaagattgatcaaaaagatgttcgttccatcgagagtgtacttccagtacctcgttccagcagctctgtaggtacaaagaagtatggaagacgaagatgtggttgtgctcgatctagcatatctggaatcggaatggaaggacagtgctagcggatgtctgcgcaaatggctcacgagtgtaatcgttatacgacccatgggaatccaaaacaccaagagccagcagacgagcgataccataagcatcagcggaccaactaggaagtagaagaacacgaagaacacgacgcgacccaaggtccattcgccccgcccaaagaggcgacgcttggattgagcgagctgagaggactcttcgcgttgtccacgctggggtcgcccgagcaggctgtcttgttcaccggctgaatcgacgctgtttcttcgtctaccgaccagggaccgatctctgcgagggccgaagaaaagacggccatgttccaggtcgccattctgccattgttcatattcgctgatactgcgtccctcgccttcatcttcctcggcataattctcctcggtctccagaagaacatatgatccgaacgggtataacagatatcgtgaaagacctgcaaatactcttccgtatgccacagcactggatgagtaggaaaaaaaaaagcaagcaactgcggctaacagagcgaaaagggcaagccaccatccaaaaaacaaagaccatagtaaattggtcaaaaaaagcatgggactgacatagcctcctggagaagagtggatatcaccctcggccgttttctctacagaacggcttttcttgtacaacgcaggcttccagagtctgataccaaacgggtgtgtttggttgatggcctgttgacggtctttgagtgtgaagctctcagcatcgctggctgcgtcttcatcgtcttctattccaccctcctcctcaccgtcctcactctcccctccactggtatgtccggtttgtttcaacgaaggaaactcttcttcataatccagacctgcttcaggtaaggccgtttcgtctgcgttgtaaccctccgaatcggctcttgccaagggtctgggacgagcactgggacgtcgtctcaaggtcgagctttgcgttcgtagtgggcgaatcctgggtgattgttgcgggttcgcgccttgcttcatcgtcatatattgcttgacctcattgacatcatcatctgtcgagaacccttgccctctgtgggggattggacgtttggaagacatgcgacgcgataccgagggctttcggggcttatcagggacagtagaagattgagtcgtgaatgcgcgagtcaaactctcgtcttggccatcatcatttagttcaggattggtcgcctcggaggaggatggatcgagtgtacctgcaattttggatcaacccaagccgtcattgttgtaggttacaccaaaggcaagcttaccgtatgttctccgcgcggaggcagaggatctgattggaggcacagcttcaggagttggtgtttccattcccgccatcgcagatggctgcgtggactcgggagagccagggtttcctttatcgccagccatgacccagtgatttgacaagcacacagtgaaccttggaggcacaagaaacgagtaagagagataaattcaaaaagacacggggtctcttctctcttttatgctgtctttgttatccccagagaaagagacagaaaaaagtcaaagcgataagaccggagttcccagtgacattattgaaccaaagagatctaggtgaaacgcagaaatcgagaatgtcaatgaaagcttcattagagatgcatataagtcattgcagtatcagggaggacgaaactcgtggaaaagagtatgccgaaggggagaaatggctctttgaccgttgccttctcttgcagatgacccggtcatcagcccacctaagcagctccaaggcttgaccgcccaataagatccacagctgactcattgggcggggagctcccgaagtctcatccatggaaacaaagcaggatgtttgactggtttgtcttaaataattagcctgatatttcaggattgaattcctttttgttaactagttaacttaactaactaatctcttagtcagcacaactgaacgggcactgggcctgagcttcgcgtacagctggactgctctgctcgccaaaccccagcttcaacttatccgtttctgtttccgagctacatcccctcctctgacgaattctcaatacaccatcgtctgagcagaaagataaaggcttttttttcttcactgcaactgtgttctgtggaagacagacagcccttgactctccatagcgtcatcatcccattcgccatcatggctttagacaactactatcgcaacaaaatcgagggcatgaagcttgagattatccaaggccaggctgttctacgacgattagaagcgcagcgcaatgactacaactcgagagtccgtctactgcgcgaagagcttggcttgttgcaacaacccggctcttacgttggcgaggtggtgaaggtgatgagcaccaagaaggtcttggtgaaggtacacccagaaggaaaatacggtaggcttcgtccattctatcttggctttcaatgaccgggcttatgctaacggtatggttttctttcatcgcagtggtggatatctccgatggtgtggacattagcaaactcgttgtgggcaagcgggttgctctactgtctgactcgtacaagctggagaagatgttgccgtcctcggtcgatcctctggttgcgctcatgatggtcgagaaggtccccgacagcacttacgacatgattggtggcctagaccagcaaatcaaggaaatcaaagaagtgatcgagcttggcctcaagcaccccgagctcttcgaatccctgggtatcgcacagccgaagggtgtcttgctctacggcccacctggaaccggcaagaccctgcttgctcgagcagccgctcaccataccgactgtcgattcatccgagtgagtggttcagaactggtgcagaaatacatcggagagggtagtcggatggtacgtgagcttttcgtcatggcacgagagcacgcaccaagtatcatctttatggatgagattgacagtattggatcaagtcggatagattcatcaggaggcggtgactcggaagtgcaacgtaccatgttggagttgttgaatcagttggacggcttcgagccaacgaagaacattaagattatcatggcgacaaatcgactggatattctcgacccggccctacttcggcctgggcgaattgatcgaaagatcgagttcccccctccatcgtcagtctttccctcccctcgcccctactccgccccagttatttatggcttgttctttttttttttttctctttttcattcctttggccttgagcacgatgctaacttaactcttctttagggtcgaagcccgtgccgacatcttgcgaattcactctcggtcgatgaacctgacccgtggaatcaacctggccaagattgccgaaaagatgaacgggtgctctggagccgagctcaagggtgtctgcacagaggcaggcatgtatgcactccgcgaacgtcgggttcatgtcacacaagaggacttcgacttggccactgccaagattctgaacaagcacgatgacaaggaggtggccgtgtcgaagctgtggaaatagaggcctctccaaagcggggggtggatcccgggggcctgggaaacgatcgacgacattgtatcactagttctaatcctaccctgataattcagaccccaagtgaatccatagttgtgcgacatgtctggatccgacctatttcgggtgatgtgtaaaggtgtaactatcccttggcaaccttttcgggggcgactgcctgcttggcctcggtgcataccctccgtccacatacatgtagtagaacagccatctatctcgtactggatatggggtcggtctgatgtgcaaggagaccccggaagtagatctacgtaacgttgattggttattttcccgactggcgaaggaaaaggaggcttggcagcttcagtctatctaaaatggcacctgaaggcagtggcttactttgtaccagtacggagatgtggtacaccatgcctccttgagtgaaggcttggcatattgctgcggaccgtgtagatcagagatatctcaattggccttggcgcggtattcagggatctctgactattgtcttggcagtttaaaccccatcttcggtatatgtgggaatgtccacaccgagcgtagtagtatacatcgggtaatatcgactattaaaatcattggacgcatttctccccttgccggtttagactgacgcggaattgcgcgtgaccaaccggcggatcaacgcctgggctagcgccaaggtattttccaacctgggaaggttggactgctgaggtaaccccccttgtcctagataccggatccacttaggttcaccccatactttgatgaagtatccaggactacttcttgtgaacccgcccttgcgcagccaagacatgattgtaggttagaatagtctgaatagagagaatcctggagtgagattgtacccttggatgttttatatacatgaataactctgtatttctgaatttggttctgacaaagtcattgaccgagagtccgtttacggtttggttcgggcgttatctctttactcaattgaattagaatataaatcttgcaactaaccagaactggttagtccactaactaagataggtcaattatatattaatatttccaaaaaaagcaatcttcctcctctccacgtctccacatctccacaactccattggctctatacttctccgtactcttatgtactttgtacttggtatttctttggtttttcggtttttcttttccctttttcaatatttgactcaggaatgatcagacaactccacgattgtatttatccgaatccccggttcatttaaactatttccattccccccttcttccccaccttttctatactttcctaagcttgactttgaaatttccattcgcctagcactataattcaaccggactatgtccgatctgtggtattctatagcctttgccattgaccctaagagaacggaagccatgcctgccgtcttacagtcaacaatcaatttgctggaaagtgagctggtcaaagcccgcgctgccctccgggatatccaacccaatgcttcaccctttggattccggagtgatgaagtcgcggtaggcgccatgactgcctacagacgggatctcatcggccgcgcccccgatttttacggatctcgccgcttgacgctgaaggaactcggcctggagcccgtcgtacgcgaactacccaccgaacgagtggtaccaagggtgcaatgtataacacccgcaccgcctcatcgaacaggactagaggatgtcctgagcaatagcttaatcctcgaccacatggcaccatatctatcagtgtcctcgttgatgacgctgtgctcaacttcgcgccgcctacacaccatgatcactcagacaccatatgtattccggcatctcgatctgtcccactgtcggggcgcagaactctctacagtaacacaagcggagaacgactctcagacggaggacgagatctactccgctccagtgaagaatatctttacgagccttgagcgcagaggtatactgcaagatgtgcgcactctcatcttggacggggtgtcagtgccggctgacctggtggccgatatcattctgacggatcgctttaacgtcaacatcctgtctatccgcgaatgtcgccatctcaacgaacgcaagctcatgcaggtccttcagcatgccgttcggcctacacgtcctgccggtatgccacgagtgaagggaatctaccatttttctcccatgcatacgggacctcgggcagtgacacgaccccgataccgtaactcgtggggaacccgtgtgggaactttgcggacatccagccaaatcccatctaactccgatcaggaggatgaggtctccgcagaatcctcgatagagcagcaacacgagtggtatagcgcatcggggaagctattcaagcacactcctgaggaaggctgggcccaagtacttaaaaaatgtgagggcatcattgcctttgatgctgctctttgtcgtggcccgagacacgatctcaatctatacagttcgaccacggaggcgggcaccccagctgcggttccattgctcggacccgccgtggccaccgtagccctcggaccccgtgggtgtgacggatgccacagttcccccgaaggtccgtctatttggagccagtccccagatattcaatttccattgcttggccccccgccattgcattcatctagcgttgccatggcgaaacggcccgagctaattccaggagagcatccggttctcattgcccgctgcacagactgcctcaccaactgttggtgccaccggtgcaataaatggttctgtgaaaactgtctaccaaacccgcagcgcgttcgagtaagcctatccccgcatcagactgcagtccacgccagtgccgctgagctgcaagaacgtgaggtgtgttgatattgaatcttccctgctaatcgtccatatcactgattcttgtcatgcagagattggaacgaggtgtaagcaaagactgctgggaatgtggcccaactgtgagtaactccccggatctaggatgtcacttttttttctgaccatagtagtgtgcttcctgtaagctggaatgccagcacacgtgccaaggctgccagggcgattattgcattcagcacaatgaaggatgctcgaagacactggtacgtagtaaccgaaggccctataattgcatgagagcgtatactaaccttgtcccagtgtgactggtgcaataccagtgctcgcggtcgaatgcgtggcgacttctactaaatttaatttcgtgattttaaatatattggtaatcgacacgtcgaattatcgcgtatgtacggagtacgttgacctgattttcaagcgaactatgaagcgtggaggcttccagaattgaaactcttatctcttatcggctgtgcagaccgcaatagtgacagattttggcagaacttggcttttctcgggcagaattgtagatatatatatatatatacttgaggttgaagataaatacaaagccttgaaacccgtgatttgtatgattcattaagaaaacatacagaagagaggtaatatctatctctatacagtaggcggagagaaaagcggtggtcctaaagtattagaattgacttttgccaccttcgccgctattgcggtccgtttccgccgcattggaatattcatataaaggatgcatcccctctctaatgattgtcaaattctatcatggcccaagatactctagcctggtcatcccagcttttcgtcgcacctccagagcgggcgcctcggctaactggcgacaaaatcactctaccgcaatctgcgcttgaacagctactggctgccgctccgctccaagctgtcccctcagggaattctcgtgtacttacttcgtcatttgaccctttcaatcaccataccctcgccgtcgaatcgcgcgcccgtcaagcggccgagcaacatcagcagcaactcccccacccgttaatcttccgcattgtcaatcctctgaatgggcggttcatctatgcgggcattcgggagttctccgcagaagagaatgaagtcgtactgagtacattgctcagagacgcacttgatatcaaggatgaagagtccttgagcgaaaatggcggatcacaagacctagcggtgcaaatagaaagggaaccctcaccacggactggccccgcggtcacagtacacgcgaagcaactacccaagggcacctatgttcgcctccgtccgctagaggctggatatgatccagaagactggaaggctcttctggaaagatacttacgggataactttacaactctcacgacgggcgaacttctgacggtgccgggtacccggagcgagtcattcagatttttggtggataaagtgtttcccgaaggcgaaggaatatgcgtggtggacacggatcttgaagttgacatcgtcgcattgtcagaggaacaggcccgagaaacactacagaagagattggaaaagtcctcacgcgcgccaggcacaactagtggcagttcgatcggcggtatcctcagcattggggaagatgtcactgcccaagtattgcctggggaatatgtggattatgagcttcgagattggaatcgccaggatactatccagattgagcttactacggacaacccgggattgagtcttttcgctagtcccttttctactcgccaaagaagccgtcctagatcagatatgcatgtcttgggggacttctcgacccagtcgcccaagaaattcgatctccggcctacgaacatggttctagaagacgccgaggctctctatatagcagtccacgctgatcctgcggatcagagtgaatcatctgatccacagcggcagtcaccgtcgcaatatcacctgcggatcagagtgaatccttttgattctttggtcagtcataatgggacggaagagtcccacgagcctggcgatgtgcagtgcaagaactgccagcaatgggttcctggacggacactacttctccacgagaacttctgtctccgcaataacatattatgcccgcagtgccagaacgtctttcaaaagcgatctttagagtggcaaggccactggcactgtccacacgactctggttatggcaatgatgccccaagcaaagaaaaacatgacgctatcttccaccaaacacacaaatgcatcgactgtgctggggattttgagggacttcctagtcttgcgcaacatcgtactacagattgtcctgggaagttgattctttgtcaattctgccatcttctcgtgccacagaaagccgattctgaccctgatttacacgaccccgaggtgatgctctccggccttactccacacgaactggtggatggaggacgcaccaccgagtgccacctgtgtaataagattatccgattacgtgacatgaacacccatcttcgccaccatgacttggagcgcctttctcgacccgcaccgcgcatgtgcatgaacaaaaactgcggcaggacattgaataaagccggaaatgagtctgttgggctgtgcaatttctgtttcggaccgctgtatgtggatacgcacgacccagagggcaaagcattacgtcgtcgcattgaacgccgatatctctcccaaatgatgaccggatgtggcaagccctggtgtcaaaatgagtattgcaaaacggcaaagcagaaagcggcatctgactctggtcctccagccgcgatgagtgtggtggaaattatgaagttgacacgcccacttgtcgaagctctcaacacccagccggatgtgcctaacatgtcgcttttgtacctctgtgctgatgaaacaagtcaacaccgtcgcaatcttgcagaattgattgcagcagagagcgttgaagggaatgacaaagtctatgatctaccatggtgtattgcagcagccgaagccgcgggtggcgacttggaaaaggcgagagagtggctgtctaagtgggcaccaaatcagggcgcaacgagtacatgatccgtctagttgttgatttagacttgattgggtatgagaatatgggcttggttgatcaagttgagcagatacaaggatttaataatgcataatgaatgatatataaacacagctagaattccataatattcatgattaaaatgcaaaggctggtctagaattgagatcatagacatcgcagccactagcctaaaggaccatacatgcaacgcatagacagagaacatgtatcaatcgaaacccaaccctttcaagctgcacctgtcttcgcggcgagcgagccggtgccgcgcgaagagaagatacccataattccaaaaacgacatagaacagagccaatggatacgccacgagacccctcatgccactcatacgcgccacagcgcaaaacattcccgatgaactgtatgtacaccagccaacagcggcaacggtcaggagatagccgaacatggtatccatgggaatcatgatgccaatgagactggtaagcaccaaaggaaggaagcagtagcccaacacgctagcggagcgcgggaaggtcagagtagcagagaaatggcccgcggccgaggcaccagacatggagggtttgtggtggggattgtagttggtagggtcggcggcgtttggagttggagcggtgtcgagagcgggagacatgaggctgaggatcagatgcaaagcgacggtaccgaaaacggcgacgccgtagatatagccgtagaataccttgcctgagaggaggaggaaagtgccgtacaagacgatgtagagcagagctccgtagagatcgctatcatccataaggtgattatcgatagaggcgaagggattcagaacagtcagtgtctagacaatgaaaccgttagcacccaatatcgggcattcacattgaccagaactacaattaaattaaacccggggtaaaaaaacaagccacccgcaagaccgggaccccgcgtctcctgaaagcgcctgatataagaatcaaccaagactaaccttggtccggatatgttcaaagttgacacccaactcctcaagcaacggcggttcaccatcatacccctccgtcccaaatgcagctaaccagcccgtccttaagccgccctgttcgcccatccgtccactaacgccagcggctgcggacccgaatcccccatacccactaccggcagggtaagcttgtgtggagggattgggagctccaccaaagccggcaccatatgatgcttgtgatggggttgtgtgaccggaaaccgaggagtaggacgaggggaagaactggagattctgtggtgcggagccctgaggggcgtagccctgctgttgtggatagtattgggccatgaccacgactgacggcgtgaagagcgaaaggtggctagtttctgttcgagtgtaggacgtgcttgggatatctggagagtagcgacaggttaatgtgtggattgttgtagagcttcgaagctccaaatggcctcaataatgttggatgactaagcgactagtcgcccgcggcccagggcccagggcccagtgtaaatgtagggtagagaaatgtctttctttctggatttagaatgtccaacgtttatctgaatttgattggaattggtaaagcaatgtgaaaggtatggttgaatctgcggaaaatctacttggtaatgtttacaggaaattgataccgatgcccagctggagccctttgcggccttcttcaccctttcgcaatgccagaggtaaggaaaagttaagctcgaagcgagcgacaggatgagcgtaaacgataccgaagccagctgcgacactgggcagtccgctttgtagttcagagagtgttgagaccagagcatcctgcacctcaccattagtagtaggagtggctttctgtgaagtctgcagagaaagcaagcggccaccgttcaagaacgcctggaaccgcacgggcttctcagccccaagtcggggaagcgggaacagcagattggcgcttccggcggcgtacacatcaccgcctagggaatcaacgccttcacgaggaccgagaccgcagaggcggaatccacggacgtcagtaggtcctccaagctggaagcggtcattgacacgggacagttgagggcgagggttggactctagtccaagagggtagataagaccagcacggaatccggtggtgaggctaacgccgctgtcacccttaattcctgggatgggaatagggatggcaccttgtgtctcaatttccgacttccagaaagatacatcgcccttcagcgggccaaatccagccagctcattgaaggccttggcatagtacccacgagatggcagcaaggcattgtcccgctggtcgttaacccagctatggaagatgctgctcttcacgctgtcacctgcatctgcgcggacagtaggtgaggcgttctccgcaaggccagtgagctgtctccagaaaccggtgtatccaaattcgtgatggtggcctgatttggacatccatcggagcttactccaaccacccttgagaacctcctcgtgactcgcccaagacttctgtgtggaacttgcaataccgccaatttctaggcggaaatcgggatcacctaagatcggggtctcgaatgcagcctggtaagcggaccgtgtccgggtaccgagcgaagcgttcaaatttaaagtctcggcaccaccaaagacattgcgccagagaagattaccgtaggctgaaccttcagcattgcccaagtctgttccagtcttcatcagcacacgggacttctctcgcgtcgccagatggacatcgatgttgcgcatgccattttggccttgcgactcatccaagtagaccgaaataggctggtggaatagatctgagatgatgttagtagatacccatcatcattgctattatcccatcgtctcataccgaaacgtccaagtttatctgcggtagccgacacttcccgcaacgcctcagacagtgtatagggccgacccttgtttgcactcaaaagggggctcaagttgcgctcaaggaagcttcgtctggtatgaggagcactggtgacttgaacagaagagatggtgcagggcagggtcgaattttcgtcgatctaataaatattgcgatcagccgggaactccgcaagtaaacgcgaattggctgtcatcggcttctagatgtgaagaccataccaattcagcgagtcgatcctgagccttttggtaaatggcttgcatgcgctcattcacggcctgctgttgctcttccaacaccttagggtctgctcgctgttgcaaacgttcgaagatctagaagcggatagaagtcaatagagggtcaactgagcatttaggcagttcatgagctgcctaaggtatgcactgacgctatcatctccggcagcaaaagaggaagacatttttgcggctgcaatggccagaactttcggcctccggggaatagatcgggggtgcgtgccaaacccgcaagatatggaaccagcacgtgacctggcgaacgtgagcgcctgattgcgacaatctatcttctgactccgcaacttctttcactgttcattttatttcctgggactcgctttcccagtactcataaacaccgacttgtcttattctacttcgcaaactttattgcttctgctatcgcttctgctccaatcactaaagatggcgacaaaagcggctttcaaacgggtaagtggccagacctaaggtcaatcggttatccgtgaatcgtgtctaattattatagctcactcgtgaataccaaaatatccaaaaagatcccacgccatatattgtgacccacccatctgagactaatatccttgagtaagtgatatacaccccctcgagctaccgcagaacctcgaagctaacctgctccagatggcattatatcctcactggacctccggggactccttatgaaaacggacagtactggggtacactgatattccctccagagtacccattcgctccccccgccattcgcatgcacacacccagtggtcgattccagccttccactcgactctgtctaagcattagtgatttccacccgaaatcattcaaccccgcctgggaagtttcgactattctcatcggtcttctctctttcatgaccagtgaagaaatgaccacaggaagtgtcagtggttcggaaagtgagcgcagagtgcttgccgcacgatctcggtggtggaactcgaccggaggaggttctcatgtcagcgccactgccggtgtcactcgaacttccaaaggtatcaacaatgtcaaggcgggagatggaggcttaaagttccgcacagaatggaccgaactcgaccaggaaaattgggcttggatgaaagagcatcgcatcgattctgccaccggtcagattttaccggatcccgacgcgcccaccaagtgttctccagagacaagtgctttacgtcgacgtcccaacggtagtgctcctggaattggttccgtcgtggatggtggaaatgtcgcgagagaggctggtcaaggctgggccagacgaaaccgaatctggatatgtgttgctgtcttctttggctatgcgttgatctcgcgactattgagtgatatgcgagtatgagactgaaatagtttcttcatgttgaataccctttcctttgtcttcatgtcttatcctcgcctttccttctttgtccttagcgggttgcaagcattatttgggcgtcatggggttttttttctcagattctccaagattctccaagtccaagacaataaagtccaattattgaatacccgaagaccatttgattccgagtatataggttacaccgttgagcaccggatcatcccagacgagcgctgagttgggcttgtgctcgcccccgcattggcaacgtaactacgctccttttctcttctaaatccgccttcatccaactgcatagcctgttatccacttcgttattggtttgtcttctgtgttttacctcttttttctttgcattccgaacttggctcttcggatggatcatctgcagcctttcacctttggttctacccattcaggtcagtgcatctctagttgatatacctgatattagggaatctggccttattgaactctgaatcccgttcgcttctttttgcctctgttgcctcgtttgcctccttcgaggtcaacttcccgtcaattttgagtgatattgctctttgtttcctatttgtctggttatggacttccccatcagtcagcagtgttagagttgcagcaaagagatccccctcgatcatcaagagcttggactgaaatccccccactagaacccaaggctaaacctgcgccgctggatcggccttcttttacattcatcgatcacgacgatgacttgacctccaaaaggattaaagatgtcaatgcacgcaaggctattcgttcccatgttatgcgcgatgtacgccgacgggagagacttgctgggttgaagcgaacatccagacagaatcgcgggcaatccaatgcttccaaggctaccattaatgaatcagatgaacaaagactggtgctgagggcttcatctcagtcctccgcttcgtcttccatactggatacagactccggagacggttttacgtcaatttaccgtgggcgtcctgtcaggtggtgtgctggttatcctttgcctctccattcaaatcccaacccacctacatcatggtttcttgatcctttctttacgttgcccggtactagtgagcttccttcgatggttgcacacttggtgtactactgtaagtattactcattcaaccttgtctatcctagtcgttctaggtgttcataccgcatgagcctccccagaactagagctgaccacatggcgaagggaaaaccatattcgtaccgatgacttttccgaacacgagcaaagattcaaagcaagagatggaactaatggttagatcctcattctctgacccgggaagtttctttgggctgatgagcatgtgcgctgcacatcgagccgttctcgcgagccagcgatcgggcaattgggactcggtgcttaccaacgaccctgactattgtatgatgagagcaaagtccattcaagagatgagcgcaaaagtacgggatccgaatcgcagactcagcaatgaggcatttgataccatagtcaacctcctcactggctcggtatggattctattcgtgacttcggattgcagtgttgctaacagtccacagctaattatcggagagttcagcgaggtccatactcacctaacagggcttaaaagtatggtcgacctgcggggtggaataacagatgagagtatccgttcctcctctatgttgtctgccatcatcacgtacgtgtgttttcggtccacctctttactaagctccgctcacggttgatgaaatagaaccgacatcaaagccgcgtcaggattgatgaccaaacctgttttcccattgacttgggatgcacagccaattccttcggagatccaacagcgaatcagaccactggcttcgtcccctctcaacagactaggcacgggattttctgtcaacacgtttctcagtcctcccttactgaaaattataagtgtgcttcgtgacatggtattctttagcatcacctatcagacaaatcccacggtcatcaaacctggcgaccaagactttttccgcatcctcaactgcgaaacagagcatcaacttctcagctatatctatgcagaaggttcccccaacccggagcccaatcttcatccgatcgaagcagtcactcgagtggctgctatttgttatctcaatcattttctgattgtctcgccttcatcatctggattgggtcgagcccttacgaaacacctcaaaacagcgttggatagctgcaaattgtctcttcttgtaggactgccaaagcaaaacttcggactgtacgtttgggcattatttatcggagcccaaggtgcccttggacagcctgagagacaatggtttgtggagcggctagcccgtgtcgcaatgatatgtggatggcagtcgtgggagcaaatttcaaaacttatggccgaatttttcttcgttacagctttggacagcttgaattggcgctctatctgggatgaagcaatgactggatttgtgatatccgagtcggaggaactggaattctcgtctcttcttggaacgggtgcactctcccttacttagctctcaattatgagcgcttgtatattttgcgctgcataatcaacatcaagtgtaataataaaccgaaagaaataacagaaagaaagtccgtgaagtagatatataaagatgaagtataaaattcaccgttttagactcggcctatcacgtggcacctttatgtcatcaaaaaagtccgctttctccggtcttttatcgcttttgctttcgtcttgaattttaccattcaatttcgttgcttcatacttcaaaatgggttggttctgggcagatactccgcaagctcctgcagtctcgatcccacatgcatcctcaaacgcatctcctccggttcgtttcccgcatactgtacagctttgatcatttagactgactcttatctaaagccgggatgcccgatgcatgaatccggctcgaagccctcagcctcgccagcacctgctgctgaactccctagcagctgccccatgaaatcgaaagactctccattctactctgctccaaaatcaacaccggcgcaaacaccgcagccacccgacaccgcggcgcagccctcaaccctttcgaagctcaatcctttgaactacatgttctcgtctatctctcaagagcgcgccgccaatcaaactgttgaccttcccgttgagcgcgaaggctcatcaattccaagaggcgacggcgaaggtaactgggagtatccgtctccgcaacaaatgtacaacgctatgttgcgcaaaggacacacagatacaccccaggatgcggtggagtcgatggttgcagtgcacaacttcctgaacgaaggtgcctgggacgaaatcgtgggatgggagcgcgtattcgccaagggactcaagtctggatgggagcactgccgccgcggcgaggaaaacctgagcatggacctgacctatgcagacgagaatggtaaattcgattcgacccccgagcctcgtctgctccggttccagggtcggccgcaagagtggtcaccgaaggcacagatataccagatactgagctgggcgtacccaagcaagtttcagtaaggactgtcctcgcgatatttacaataggcaaaattctgactccacttccaacaggacaagccctccatttgaccgtcacgattggtatgtcgtccgccagacaccttcaggcccgaaggaagttcgatacgtgatcgattactactctggggatccagatcctcacggactgcctgtcttccaccttgatatccgccctgcgttagatacaccgaccgccgctgttgagcgcctaatgaggtggggaggtgacgtctggtggagggctagcggtgcagctgttcgtgaacagacctcgcgctaagagtgtttgacagctgcaacaaccaggctgtctgcttctccactccactctgtaattattcaaaggcatggcgctggcgttccattgtttatcttcgcttgtccttgtacgatgtttatcttccctcttgtgttatatcgcaacctccgttagtctttggaaatagacacatgataatgatatctttgcattaattttacttccgcttccccaaagatcagaagtttcacgttttggtagcagatttctttaaaaaaaagtaagtgtatttctctaaaatccaccgagtatggctgcgctttcatcattcaacgggcatcccatctaagctttcatatcaacagtgaagaattgggtgtgtatggtacaaaataagaacggtggatggtcttatatattaggggaaagttggtcgtacttgacgcaatgctcaacactctcgatgctggcctgcagcattccacgagcctccaggccgacccaaacccagagcattgagtagtcgcccgagcgcacagtttccaagaatgaacggccagaccccaattgtcgtagaataggaagtgcactagacaaagtcagcttcagttgaacaagtagaaagcctcgtggaagagaaaactcacctcttaaacaggtctagattggggttcaaactacgtcctattccttcaagcagaagacatgaaatgacgacgttgacaaaatctccttcaaaccgaacatggtgtccgcggaccatagtcaatacctcactaaggatatcaccaatcttgacactccccagagcgaaggttcgagacttgatactcagaaccaaatgctgcattttcagtgcaaatacctccgggtcaatgacatcttccggtgttcggcaccgctcgaccataagctgaccagcccggtatccgtcgaattcagcaatagctcgaaagaggtccaggaagttccgtcggttggtctcatttagctgggtgacaagaccagtgtcgataaatatcaactgcggacgatacccctcgtcgttgagctgggaaagagcagccttccagtcctccgggtcattgagatgcggacgtaaccgcttgaggactgcctctgtcacatcaacttcggcccgtgtcggggcatcgaacgcacgcgaatgcttgcgaagggagaggtctagctcgctaggcctgtagaaacgaaccatgatgttccccggatggagatcggcatggataaaattgtctatgagcagcatatgcaaaaatgcatcgaggccttcattagcaatctcgtgctgatatagaccccctccaatatccaagaaggtggccaacggaatgccctgggcaaattcctcaaccaacacctcacgggtggtgtattctaagtatgggtatgggaaccaagcagtagtgcgagaattgaacttctggcggaatatgacgagattggcggcttcaattcgaaggtctagttgtagtttcatcatttcaccaaactgttgtacttcgtcggggaaagaaagccagtgcatcgtggggatgacattgatcatgtgagcaaaaaatgacatgatccgcaggtctctatggatcatttgatcaacactggggtgctgcaccttgatcgcaacatacgatgatggcacccgctgcggggagctcttgactagcacgtcgacattttttcgaaccttctcgcccagtgtttgtggttcgattcccagttcttcttcattggttgcagcaaggttcggtttcaacttcgccttatagacctgtgcaatcgcaccaacgcccagcggttcctcctggaactcttcgaatatgtcctcgaatggcagtccgttgaatgctttgcagataatacgcttcgtttggtaaagtgagtgggcgggggcatttgagtgaagtgacgacattatgttgcacatttccggtgggaagatatctgtccgtgaagcagcccattggccgagctattcaagaagtcagcttgtaagttccgtctcaatggacagttattagccaaccaaacgtaccttgataaacgcaggaccggcccgttccattgccttgaccaagaaccgataccaccacaatgtgccagaccgcgcgccatcccggccctgcactttgcgaccaagccagatggcaggcaccgtggcgacgaccggaatgaatatgatggcaaggtgcacgaatcggatccctgtagcaatagggtcatagacatagcaataaaaatagacccatgctgtctgacagagcttcgaaaaaccttgcgcgtcgggtgagaccatcttccgtacctcctcgcgcgaagcctccagcatctgcatttccgcggtcttatcgtggccatcattctctgccgccagtttcaaaaaggccgctggtgccagagtggccatgagcaccccacctattacgggagccctccgcggggtgccttttagttgccgaggccatagcggacgactgaaatattgtcgggggagacgcggaagcccgcgtttgagacagaaacggccgaagagaccggccgccctcatgttatcatgcaggcgtataatattaacatagaatcacgaagttagtagaaaggtcgaggtagaagtaacgagtagccttggagtagaattcctagtcaagatcctggacgataaacaccgtgctgcgacgtcattatatgagcgcgggtagataaaaaggacaaacataacaaacataacaaacatagcaaacaagacaaatcccatcatgtgagcatatacatatcacctgtacagtactcggtacataagttataacctagctaatgataaaagtaaccctaactgctcattgcaggctctagttaatcttctaaagtggtggtcgaaatttgcattctgcaacaacattcctcgtcttttgtccgcttgcaattaaccattgccgaatccggcaatgtccactgcagatcctagctctttatcaaggagaaacagttgaggggtagatcttgctttatagcggtttctattagtgactgctatgattttcatgtcccgaaaacggatcctcgagccctattcaaacggccggaaaaatggtcttgtttgacattaaatcgggccatgatgcccagagatccagagaggctttttcattatcttcagtgtctcaaacgattgccagatggagcgggagttgttgaccatgagtcgtacccagaaccttcgcgatattgagtcgaacaatgagaaaaagcactcgcactggcgcgattgggcctttgtccttctgtggggtgctactggctatgcgtgcatcattttgatggtgttgctctactctaacccgaagcttatacccttcgatatctgttcattgctgtttcgcaaggagatttctccattcttcgcattctcgcaaggaacgggtcattactccaagccccaaggcttcaagatagtcgctctagttcccttccattaccatgggcgtaccgaaatattggactgctatttgcaggtatgcacaatcctgccgctactatattgcttgagtctaacataattcaagaaaaacttggtccataataatggatttcttgatcaggtcatctttgtgccgcagactgatgacgctgtcgacatggaatggctttattcgatcgtgaatcaaacacccgagtatgccatttcttctcgatatcatgagatagaatgggaagttgcaaagaataatgtgatgtacatccgaatcgacggcgatatcgtgttcctggaggacaacgccattccgaccatcgtcaaaacgaaactcgacaatccaagcacgctgatggtatcggccaatgtgataaacgaggcagctctcgcatctctccacagtcatccgggaactgcactcccatatctacctgaattgtacgatgtggaacaaccgtcccgatcaaagcttcaactgaagcacgactggcgagcttcgaatcttccaaactggcagggcccgccgagcttcaaaataagcaaagactttgatccgccatttgaagggcatcgctggctactccccagggatgcgggttctgatcgagatcctatcgcgagatccgtatacaccgacaccggtccaaccctgcatgactggactgttggtgcgcagcaacattactcctttttacaccacctagaacacaatgatttgggccgttacaagttcccgatgtgggtcgatccaaccgagcccaccagcgataattttgggtgcttctggggtaatgatgcagtggatgtgcaccgtattttccgcaacaaccaaaatggatcctcccacaattggcatatgtcggatggctctcgtccgcatatcattatagatggcaaggggcttgtttcacattattctgctcgccaaggtgcggctggtctagacgccacggatctcataactcgttaccgagcatatgcgcaggagaaagtgtgtttgcagactgagtgatctcccgacaactctgggtatcagactgtgtcaattaacggaggaacttacatgtacatatacgtatatacccaacgattttgttcaacttttgcacgtctacaactaggttcttaaaagaagtagattctttttacccgggtgctcatggtacatacaacctctctctccaattaagcatctgttacagccttcagctgtgaggcattgactttcaccaagtcttccagcataccccgataacccacaggaagtgcaccagactattttccggttagcaaatgactagcattattccagggcagaaagctcacgtcgttcgccagcagcccttgcacaagtacaaaagcattgtcacggtctttgatctcttgcgacttgtctgtctcctcggccttatcttgattgggagtgcccccgcctagggtcgtcttgagtaactcggtaacttctgtcttgtgcaggcagtctacaacggcggcacaaccgagtttgtttgtggccattagagctagagcaaaccagccttcactgcgaacgacaggccactgagtctgtgtgatcatcgcacctattggcagcgaaacaccctcgtgcagggtgtacagtctgtcaagcaaggaggttgcttcgtcgtctccatcgcgagccttggggctgacagttcgacagatcgaagcaactgtccgcccaatctcagttttgattggcgtggagtcggttttctcgaaaagagataggagtagagagagataggtccgttggtgagccggggaatcaagatcttgtgagaggggagcaagaaggcgggagatgttatccgtcgaggatataatcacttggcgcgcaatacttgcagccgagaattgaacctgtggaacagattcatatgcccataatcgtgagatggcaggaatgataccagcttctccaagaatggctctattgtcaccggcaattgcaagattcttcaggaaaccaagcgaggagtgcagaaccgctccccgagaatcgctcttgagaacggatatcaattctccgtgtattttcaagtctcggaccattacctggcagacctcgtcggaccgggcgagatttccaagcatgacacaggcacagacctgaagttggtcctcggttgcaaccacccatgacttcaatgtctgtgaaagaggagagtcaagggggtagtattgggcgaaaaatggtgaggctgacacctcagccaaagcctggttaatcttgagacggagctgcgcgagagccttgacgtcttcgttcgaagaagggtccaccacaatcgaaaatgaatggcgcaggacgtccagcaagccttccaccattccattcgacacgcagacattctggaacctttcattttctaggtaagcagcaagagaagtcaccaatgatgaaaaatgtgcaaagtcaagagtatcatcaatggcaagctccatcagaagtacaattgttccgtcgggagagtgttcaatgccctcggctgtaagttatatgttagatcggaagatagaccgaggttaaagataaagtataccttgctctgaggccagctcaatcaaatcgtaggaaaaattgagtagagcctcattgtcttcgatctcgccatctttgatcagcttcaataaaatgtacgctgtccgattggcagctatctggacatgtgctggttctgatatcacattagcgaaacgtgcattatttggctctttctagacatactgtaatccatgcaaatattgtagatgaccggaatggcaacaaaaatcaaatcgggatcgaggaagtagcgaatgatagcaagggtgtagtttcccttgacaacaatttccctattctcatctgcatcaactttagttatctgggcacatatattagtaaattcagcatacctgtatcggcacatgagtttccaataactcgtaaagagtggagtaacaacctggtatcaacttcgcccttcaaagaaactacatccaggaagaagttcaaaacaccagactggccaaatggagcacgccacgaagctgaatcataattagcaatttgtaaaattaagaaatagataggattgacccacgatctctgctaccatccgcaataatctcagtcgcttgaaccaagtattcggagttacaagcccagagcttttgcagggtggcgttcacgctttgtagagtgtcggcatcccgtcgccctcgttttgtgtttgcatcggcctcttcaagagatgcatggagctccttgagatcgaagctatttccagcctcgtcaaccgcctgggccttttcaatgatctcccgcaatccacggaacatctcctgttgctcttccgagccaatggtttccgtgcgtggtggcaaagaagaagaaacctccggtagatctgagagaatctttttgataggaggcaattccaaatccccctttttcgagactgagtggccagcatctccatgaatggccagctgggcggtagatatacccgcgtcagacatgttgccgaatcgagatcagatagttgccttcggggtgtggattaaattggaaggtccgtgttgagttgaagatatgaagatacgaattccttgaccgaacgggcaaggccttctcagttagacggaggagcctaggtggcagcctgttgaccccgtcgcaacaatttaaacactgtaaacaaacagcgtttactctgatatgagaatactagtggctttaaatcaggcaacagagcctaaaatggattcttgatattagtggaagacaagcggctcaccagaattctcgcagatacaaagtaagtttagctcttcgtggagagagggatgctgcctgaggtggattcaggcaccaatctcttttgggttaggcccgagtatagtgagatatcgttttctgccggacattgtgtcttcacttggattaaataatataaacgcatagttaactagctatgtacatagttattagttatctatctatcccctcggatcaagtctccattcaggcttgtgatcacgtgctccgctcagacgtgtatgttgtaggaagcttgtagaagaaatccgatgaggagtatatctattccgaaaaaaatatattatcactttgatttttaggctgttctctcactagggagttttggctatttcgatataggatataggcccgattgaagggaggagaaaaaaagaaagaaaaaaaaggatggagctgcgcggaatcgaaccacgatattcaaggaatgaatcatgataatttcccgttagggagaatcacataagcttgatggactaaccattatcctacagttccttaaccagtagcctatagcttctaattttgggagaaatgaccattaaagtgtggtcgtcttcgcaaatctttcaatcttagtacaccatgtactagttaagacgttcagcattccgaagttaactagttagtatgtattatcttatagttaagcacctcttttgcttagtattataatttaaaggtagataaatccataaaattctttccttggcgtagggtctagggcaagttcgggattgtggtctttggctcccgtatgtgtaccttccgactagttatctgactctagaatgataatctttttttttttataaaaaaaaaaaacacggacatccggagggaactgcaatatattctgttttaactcggcaatatcggacttatctcggtgatcaatggacgtatcagtgcccatataagtgcacgtgcagatggtcactctccccgtactaaatacatgatcattcatcgcccacgcaattttccataaattgcggatgtatcagccttccgcagttggagggtcagtcctggaggtatcacctgcatttaaaaacagatacttgagccttggagcgccggagattggagattagtaatgaggtattgttacagtagctcgggggaataatgcgtggtatatatctatatgggaacagatatgtgcatagttattgattatcaatgcctgttcgactcccactcaaatcatgtataagtgtacactgtcggacatcaatatctagtcgcatttgacagggcctatttggatcagtggagtctcattgtcttttcctatatccaattaaagagctgtaaaataatcgtcgtaatctattagggatgtggggtataaagcgagggttagttagtctacctttaatactgtaaaagaagtaatcgaacagggcatcagacacctcgatattgtcgtcgctaatgccggcattgccgaatcatatccacccgtcaaggatatcaggcaggccgatgtagtcgagcatattccaacgtgttaggtgtcatgtcgttgtactaggctgcgcgcagtctactgtagaagtcagccggaaagcattataggatccggggccggtggtctggcgtatatctgctcggatttgggacacagtaaatagaagcaaattatccaacctccagtcccaagtgcggcgtatcgcgcatcgaaatcacttgccaactggtatgatgttcggatcaacgaggataagaggctcaatgcgtttgtcttggattccgcctgggtgcagaccgacatggacaatgctgctgcacagctttggacctgtaggaggtgccgaagacccatgagaagccaattaccgggataattgaggtcttgagcactggaaccaaggagtagtatggcggcaaattcgtggtgaggttcaggattggtgatcatgggcagatcggaccaaattagggtttctcacatgaagttattttcgataccaaagacatgggagcttaatgccatatcaatgactctagccactatgacaatggtcaagcatagaaataggagaggtcccgaggtccgggagtcaactgctgacataatatagttcgtgccggcgtgctcaaaacggatctcactgctctgttcgttcttctctcttgatcttttgatatacctttcaaacatatgggataatttatatagaagaattatatatttaataaggtcatatacatagtaaccatctaaaatccaaatcccctgttaagagatcactagttatagacttggcaggtacacaagaccagtgacccggtccggggcgccaagaagcgcatcgcccaagctggcctttaccgcatacagcactgcaaaactccgagtcgaatccttcattttcgctgcaataacccggtgctatcttcacgattgacctctcttctctcctttgtgaacctcctatcgtgtcgaccaatctcaccatgacacgcgctgtccagaccctctccgttcttctccttgtctcctcggtatgctacggagtcccttcatctcagaaaggaacacaatcccgcatggatatcactgacaatcgatcagctctacctttcccttttccttggactcgttcccctgaacgagactgtccagactgaagtcattccagttgtacgttacccaccccgtcaatcctccgctccccggacttcgagtgtgtcgaatgagataaaagctaacctacaatcacccagctcccattctacgcgcttattgtctttgcttgctacctcctcgcccgcctgggtgtggcgatcttcaccttcaacgacgtccccgaggcacacgctgagctacaaaaggagatcgagcttgccaaggtggagttgcgccagggcaaggttgaggttgattgattgagagatggctgtgcgcattggttagatggataaccagacactcggaaccaaccttggcatacaaggtctgggcctgggtctggattggattatgtctttgcaggattgaaaaggctgcgccggatcaatataatacgctatgccccagtgactttttgtttccgctaccaatggtatattctcttgatacacttctacaattcaatgtctgcaaagcaacgttggaggaccaggtttccggttgttggctacaacgagactcccggtgattacggggcactccgtttcagaaaaaaaaaaaggagcaaggagtgcaatagcagtttcaaggcaaaaggtcttttgggggcagccagccggtctgccaatctgccaaaattaaagaactttttctatagaaattcatcaaggatatcgtaaaaattacatgctcaggtttgtgcacctggtctaagcatggacagcaaaatcgaggattaaaagtgtcccaaatatgaaccatcagagcatcgcacaaaagggaatgcttatgataatgtaatcatttgcttaaacaacctgaggagagggttctccttgaaccgcctcagtagaggcttcttcgacatgcttttggggaatattgacgataggggacaatttggcctgactatcgtgctcttcaatattcctacagggaaaaaaaaatcagccacaatccacaatccagaagatataaagttgggggtataacatactcagcctcccaagggtagcagatccagacatccccagtggtgaccgcggcgtggtaacgctggtcattgtccgtcatatctgtgggcagctcacccttcttgggctttttcttgttctattccagctgtcagccaaacctatcaactcaaccttcagataaaataaacaacatacgtgcagaacgaagacaaaaaatttagtctccttgtccttcctcggatcattggcagggagctgcttctgagcttttttaacatcctcctcgagctcgttcacggcgtattgtagggttgtgcgagtatcatcgacctcgtcgacgataagaacgttcttgccgatcaagttggccatcgaggagttcatgtcgagccattgcaaacgggtgaccttggtaccggggacctcctcaacgctgtctgtgcccaatttttcgtagagggacagaccgatggcttgaatggggatgttagattgaccaggcttcttgaggaaggacctgtttagcgagtaaggatcaatatagtcgagatgaaggagcacgtgtgaactgaacgtaccggaggatgcgggcagggatgtaaccaccaccaccgatggcgattataaggttgatgtcccagttcgcgaggggctctttcgccgagttcttgcagagattgtggacctgtgaaggatatttgtattagtttcagtccttttaaagttccgagtgatgacaattgtggactgcgataagagacaatctgcattttgcggggttgagggggaccttgatgatattcatgtgtgtttgtgatgtcttcaacctcttcttttttaaaactaacacaacgacatagtgtctagtcaatagaccgggattcttacatcgttgtatgtggcatattgcttgttttccgacatgttggcgattgtgatggtttcgaaattggatggagatatgaagaagataaatgatatcccaataaagatcaagtatcaagaagtgaggtagctgtcgaatgttttcccacagagaaggaaaaaatggaggggaaaaaaaggaaaaaaaaaaaagtcggaccgaaaggttatcggcccgtccacgggtgtgcggggcttttatctgtagacacttctatgttgtgcagcttgacccgggatatattcatattcacattcatattgacatgcattccattcgaatctataatatctaagtataccaactaggctcgggcacttcatgtagtagtgcatatcgtcccaattctcgattcttgtaagccaccggatcatgaagagtgtgcacgcgaatatcccgccagaatcgatccaatccaaccttggaggcggtggctcgggctccagtcacttcaaatacaccagaagtaaccctgagtccgacatctgtggcaaccaccttgacgctagccacccactccgcaacctctccacgttcctgggcggtgagatcagatttatgcgcctggtatcgagtataaagccctgagagttgatcgcctgctcgatcggcaagggcttctgtggcacgcagatgcgcaaagaagttaccatagcgctcgaggatgtagaactcatccgttgcggattccttgttgtcgccgccgaaaggccaagcccgtgttgcggttttagtatatttggaggcgaaatctaaagcaccaagggcaatgcccaagtagaaattgctgaaaaccagttggatgctgtggggaagagcgaaagtcagcattcagccatgtaactgctgaggaagcatgacatatggaatggcatagacagcactcacgttggcaggagtagagtggggaatgcgatcttcagggtgtcatcgcgaggcctcttagtagctgcatcccagcccagtgcatctgaccaagaagcacggacattgtcaatctttacgcctccagactcggtcaggcgcaacccaatgttgtgccagttgtgagcaaactggataccaggctgttgggtcttgaccaaagcaaagatatgatcctgggtaccatccaatataccttcaaggactgtaagatcggacacaacgcctccagtgttgaagtacttgttcccggtgaatacgatatcgtctccgtctggggtgatattcagatcggcgtcgcgggcgttcacagcgccaccgacaaagtagttgtttgaaatgatcaactgatgggttcggtcggcttgttcaggagtgcccaccacgtttgcaatggtagaccagagaaggtgatagccaagcagcataccaatagatctgtcttcttgttagggactatccttcggattcataagggatgttgggatgttacccatctgcctttgcaacctctctgattgccttatatccaacgctccagggttgctcgccaccaccatacttcttcggtcccagaagctttgtcaagcccgaatgcttgagcagggccacttcggcgcggggtgatttgttctcctggtctctttgggccgcatccttggctagcacctcggagacctcccgggctctaacgatccatgcctcttcggtgtccggcagattggaccatgtggtttcatattcggcgtagacagccggatctgtcgctggagcactagattgggacatggcggaagggtatatgcagtatggttgatcagttcaagttctatttagatcaatggactatttcttttcatgggtgggatatgagagagtttataaatagtttccttgcggggggagatcttacatgcttgtcactccatatcacgcaatgccgtgtcactccaacacccaaaaatgagatccataaaacttcggattcgtcagattcgtcagacaaatacaatatgtcgttattatcgtcaaagtagcgccataattcaattaaggcgttccctgttgcgtacacccgggcgaccgctcatacttagatccttgccaacactgcttgctcgttcatcaagttcagaatctctctacgtaaattctctctgcgtaaattgaatggcctatatttgtggtaccaatgcctgtagataaataccccgcagaatggtatcgaacaaactgtagctcgttgtggtttgaccaacaggcccggaaggggagggcgactgttaccccacccgaaaagcatcgactgttcaatgtatccatgttcaatgtatccatgatgcttggacaagcaaaacctggtgagatgaccgcaggcattatgatcgtgcgatttgatgtgaatcatatgaagctcctgcttcatccactatcctccagaagattctggggtgaccagtactctttctcagggctctgggcatccaaccacactagcccatcagcaagcaagtcatctattacggtttgcgctcgagctttttcccatttgaggttcaaccgcagcattgaaacgctcacaaatcccagcacctgaattacttccaagactgttgcctgatcggtgttgagttctttagggacggaccgaatgtactgcttgctgccgaccttaatgatggagaacccggaaccaagaggctcaagagaccgaactgctcgcaggatgtcgtcactgtcgattacgtatttcagtcagtcccttgtgtagatatccgtatttcctgaaagaacaacttcatactctgaaacctcgagcccacttccgatcgccttgcgcttccctactctcttccgacactcttcaacaccaatcagcccaccattttcgctcctcgtctctctgcacagctcgacaactctgactgcaacctcaaagtagaagtcattcatatctccgcccataatctgggtccagaagctacccccctctcccagtccgcggcggccattcttgcccttgacgttgcttgcggcaaggggatcaaccccgatggtgttgcacatgcgcgcaaactctgctcggaacgtcgggttggactttatcgtagagctatgttctagcgcaaatgtgtggagcaacgactggaaaaccgacaactgggtctgtagggaggcagtatgcgtagagcggagattggcgccatgagtggcataagattgcgttgcctgagttcgatttgcaaaggccccgaggccaactccgcgacgagacatagtatatagagtgtaaggggaatcacttgataggttacatgtatgtagttaccccaggcggtcacccatgaagtcactgataagagacaaacccttatccagatcacgataagggctgagcccataacgggctagcgctagttggtttataggctaaccgtatacggctaggcggtccacacccacacaagcgaagtctcttcttacattccttttcttcgagctttttcttcttcccttgacatccttcgacaaccagccgactctcgacctcgtccggaccttcaaaatggccgctactacgtatgattcccattgacttcttcctaagactgatgcgatctctgcttgagtttgtaaggttgctggtatagtcgtccttctcgctggggatgccagctgtttgtccacaacaatgacggctaggcaccagctcgatccttcctgccctctatctcgattccaattatctcggatacacttcttgtatatcatggagcatttggatacagaaaaaagggtgatggagtcttgaggttgaaagcgcttggcgccttctcctccaaaaatattgttgtgaactatcgttctcgggcgctcatgatgtggtaacagcgtcttgatcctgaagcgacaaagtgtcaacatatatttcctgaacattgttcggggttttgtcggatgaaggcatcaatggcatcttgcgggtgatccggcttacgaacactatgctggaatatgcatagctagtactgaactgtaaacgatcattaaactccgatgccttggccctcactgattaaagacatttcgtcgagttattttatgccttcagttgagaatgtggcgctatatgctgcaattctttcactcggcgaattgtctcagtctcgatctatttcggacagactgttctaacactgcacagctccgttcccacccagaaccaggtcctcgttcccgagacccttctgaagaagcgcaagtcccaagaggctgcccgcgctgagcgccgtgccgaggccgagaagaccaagaaggtcagttttcccgatttttttcccacattgcgacacctcccttccaactacatgatgcataacaccattcacgatgactagaccgctaccacggtcaatgctgtcgtctgtcaaccatctttcgggtctgacattagttacacaactatttgccattttcttcacaagactttggagactctcatgctgactgagattcatataggccaacaaggagaagcgtggtgtcatcttcaagcgtgccgagtcctacgttcaggagtaccgcactgctgagcgcgagaagatccgcctcaaccgcgttgctcgccaggagggcagcttctttgttgagggtgagcccaagctcgtcttcgttgtccgtatcaagggtatcaacaagattgctcccaagccccgcaagatcctccagcttttgcgtctgctccagatcaactctggtactttcattcgtctcaccaaggctactcaggagatgttgactatcgtcaacccctacattgcctacggttaccccaacctgaagtccgtccgcgagcttctgtacaagcgtggttacggaaaggtcgacaagcagcgcactcccctcaccgacaaccagatcattgaggagcacctcggcaagttcggcattgtctgcatggaggatttgatccacgagatttacaccgttggccccaacttcaagcaggccaacaacttcctctggcccttcaagctgtccaaccctaacggtggtttccgcactcgcaagttcaagcactacatcgagggtggtgacaccggtaaccgtgaggagaacatcaacggtctcatccgccagatgaactagatttattctcatgaggaactcgggttggagcgttctctgagcgcacttcttaaaaagttacaaaaattttacgactttactgtcttgggttgtttttttgcacgggctgtttatatccactagtcaattctttagcgatacgatggtctggggtttccgatcaatttaatgcttcaaacaacccaattgcatggtcgtggacttggttcctgtcgtacgttttctcgtaactgttaactgtattccacgactgactgtcccagggctgggcagtcttcaatctacaacactgtatcggagccctttggtagtaatcaggattttgttaggccgaatactatcccgaggtcggaattccatgtcgttgagctaccctataggctatttttgaagctgtgctgaagccgcacgatcttatgatgcccatcatctcgataagctcattattgtagtcaaccagttggctttagtggtctcatgttttgtctagaccgtgagtgactggtcaattcatggcatgaatgtgttaatatcatataacattagatttaccaactctttgaataccgagggagatagttatcatcatataatgaagaagtaatcccaactactacagggtctagaatcggagtggacaaatcgaatcttggggtgatatatatctagctgatacctatgtactattgcattccttccaacgtttctacgtcaacattagattttaatgaccctttgaactctcctgttacgattgaccacaaggcagagctgtcgtccctgccagtcagagcccgatgcggatgggttatgtggtccaggcttgaaagcgccttcgcggagggtttcagtaaagagctcgtaggatgggtaatctatatcgataatttcagtcagtatattcagccatcaatagtgttattgctctctcaagtatacacatacagccgtccacaaagttgttgacctgttcttcggtcatcccggtgcccttggcagcacggagtgtgcgttcttgttcctggcgccattcgtagacgaaacgaggggtttcggcatcgctgagactggttagttaaacgaaagtattacagcaacaaagcacatacatatggattaaagcatcaagcttgctgcaaaggaaacccatgtcagcaaaatttatagttgcgcaattgcaaatggcagaataaacccactcggtcaagacatcataccgcttcaaagcgtcatttacagctttaacatcctcaaacttgacatagcctagtcgtccatcatattcgccgttatctttttgacgcacagcggcctcccatttcgcacgcagggtttcgtcatcccacgcacggaacccgacacaccacccttcgaaaatcacgaccttgactttatcctgaccctcttgattgacgacctcccattgtgcctttgggacacgatcaccttggccctcgaatgcagacttgtcatactgtggaatggctgtcggacgttcagcggcgagcgaagcaaacacctcctcacccaatacgaggtcgtgagtcgaaggttgaccacgatgctgcagtagtgggtttgaaggatgcgcttgtgccagagctatctgatcggcatggtcaaggtagatatcatcaagcgatagcgtcacaaccgcgagcgaatatggttccgagcggagggtgtcatggagagcggatacctacggagactggtgttagattccgttccgaggaaattgaacgagatctcgaggcatgggaaattgaccagctctagatcgactcaccagaactgtcttgcccgcaccctgcacgccattgagaccaatgaaaaacggcggaatactggggttgctgcggtgccgctctgtatgaacgcgcaggcgatcgagtatgaaagggatgcagtactgtgacttgtcgtccacgatttcaggcattttggcttagttttaagttgtctatgttatatcgcacgtcttttgtatctatcggctacggtacgcggaaagtttcccccccaatcggccgagtgaatctggggtcatccaccccacggggtatgttcagccgctacttttggctcgacattttaagaacctcggaattttatcaggaagtgcattggatcgagcaacaagacaatggaacagtaaaatagtccttatacgaaaagatgtacaagtgcacatgataatgacgttgcccgtcacatgcctgagtcagcaaagactcggtcccggaagacatttacaacgcttgcacttacaatgatggatatatgcatatgtttcttatgcataagtatagcaatttagtctatatccccgtttattttcattaaatcatcagaatacttaaatcacttgtatacgaagtacgccggcatgtgatacgggacgatctgccattgtaacgatacccccatatttcatggttacaaaaccaaacgtgccgaggtcctccgtttgccgagttgctttaaactcccctcttctccagctttcttcctttatttctttctattatccacttgattttcggacacatcatatatacagaatgtccgagttgcgatttgataaccaaacggtggtcgtcaccggtgccggtggtggtctggggaaagcatatgctcttttcttcgcctcaaggggtgcaaatgtcgtcgtgaacgacctcggtgtctctcacaagggtgagggcaagtcgggaaaagtatgccttatacctccgaactagacaaacagatactgacagctactccaggccgcagatgtcgtcgtcgaggagatccgcgccgctggcggtaaggccgtcgccaactacgatagcgtcgagaacggtgatgctatcatcgagaccgctattaaggccttcggccgcattgatatcctgctcaataacgctggtatcctgcgggatattagctttaagaacatgaaggatgccgactgggatttaatcaacagagtccacacctacggtgcatacaaggtgagcaccctcggagacataaaaacaagcgcttgaaacaggaactgatagccttttctctggacagtgcgcaagagccgcgtggcctcacttccgcaaacaaaagttcggccgtattatcaacactgcctcggctgctggtctattcggcagcttcggccaggccaactactcagctgccaagctcggcccggtcgggtttacccagactcttnnnnnnnnnnnnnnnnnnnnnnnnnnnnnnnnnnnnnnnnnnnnnnnnnnnnnnnnnnnnnnnnnnnnnnnnnnnnnnnnnnnnnnnnnnnnnnnnnnnnnnnnnnnnnnnnnnnnnnnnnnnnnnnnnnnnnnnnnnnnnnnnnnnnnnnnnnnnnnnnnnnnnnnnnnnnnnnnnnnnnnnnnnnnnnnnnnnnnnnnnnnnnnnnnnnnnnnnnnnnnnnnnnnnnnnnnnnnnnnnnnnnnnnnnnnnnnnnnnnnnnnnnnnnnnnnnnnnnnnnnnnnnnncacggacacgcgggccaaggagggtgccaagtacaacattattgcgaacgttattgctcccattggtaagcaagctaaaaaccccaacgcatgaattggaaaagctaatcctaaattagctgccagccgcatgactgcaactgtcatgccaccggatgttctagagaatcttaaacccgactgggtggttcctttggtcgctgctctcgtgcactcatctaacaccactgagaccggtggtatttatgaggtcggtggtggtcacgttgccaagctccgctgggagcgagctaagggtgctctcctgaagactgatgactccctgacccctggtgctatcgcccggaagtggaacgatgtcaacgatttctctcagcccgagtatcccactggccctgcagacttcatggccttcttggaagatggcctgaagacgcctagcgctcagctaggagaggagcctgacttcaagggtcgtgttgccctggtcactggaggtggtgctggtctcggccgtgcatactgtttgcagttcgctaagctcggtgcctctgtggtggtcaacgatcttgttgacccagagcccgttgtcgaggaaatcaagaagctcggtggcaaggctgttggaaacaaggccaactgcgaggacggtgatgccgtcgttaagagcgccattgatgccttcggccgcattgatatcgtggtgaacaacgccggcatcctgcgcgacaaggctttcaccaacatggatgataacctgtggaatgccgttattaatgtccacctccgtggtacctacaaggtgaccaaggctgcctggccctacttcctcaagcagaagtacggccgtgttgtcaacactgccagtaccagcggtatctatggcaacttcggccaggccaactacgctgctgctaagcttggtatcctgggtctttcccgcactctagctttggagggtgcgaagtacaacattaaggtgaacaccattgctcctaatgcgggtaccaatatgacccgtaccattatgcccgaggagatggtccaggctttcaagcccgactatgttgctccccttgtggttttgctgtgctctgacatggctcctgagccctccaccaagggtctctatgagtgtggtagcggttggtttggccgtacccgctggcagcgctctggtggccacggcttccccgtggacgtcaagttgacccccgaagaggtagttcgcaactggaagcagatcaccaactttgatgacggtcgcgctgatcaccccgaggatggccaggccggcgcggagaagatcatggctaacatgtctaatcgcgtgcacggcgatgcctccagcgagaacgatatcctcaagaacattgagaaggccaaggccctttcgagcgagggaactcccttcaactacgaggaccgcgatgtgattttgtacaacctcagcttgggcgccaagcgcacagacttgcctctggtctacgagaacgacgaccacttccaggcccttccctcgtatggtgttgtcccctggttcaacaccactactccctggaacattgacgacttggtgaaggatttctcccccatgatgctgctccacggcgagcagtacatggaggttcgcaagttccccattcccaccgccgccaataccctgacctatcccaagctcattgacgtcatcgacaaaggcaacgcggccatcgtcgtggccgggtacacaacgaaggatgccaagaccggtgaggatctgttctacaacgagtccagcgtcttcatccgcggcagcggcggcttcggaggctctcccaagccgactgccgtgcgtgccaaggctgccactgctgcgtacaaggcgccgcagcgccagcctgatgccgtggttgagcagaagacctctgaggaccaggcagcgctttaccgcctgaacggtgaccgcaatccgctccacatcgaccccgagttcagcaaggttggcggcttcaagacccctatcctgcacggtctgtgctcgctcggtgtttcggccaaggctgtcttctccaagttcggtccctacaagaacctcaaggttcgcttcgcgggtgtcgtcctgcctggccagaccctgaagactgagatgtggaaggagggtaacaccgtcttattccaggccaccgttgttgagactggtaagcctgccattaccggcgccggtgcggagctcctggagggcgctaaggccaagctgtaaaatatgagatctttggttgaagcgatgttgacattagtaaagcgagccggcacagctgggtcggtctgttgcttcttttttgtatatactacctgtgctttttgtttttagtttccccatgatgcatttatcagccgctatctgatctattaactattcctacatatgtacctgtatgtaccggattttaggccacagtcgcgaatttcccgatcggggtgccgccgcttttatgaaggcgctcaggctcctgctcactgagtatttcacagcacgggtgatcactgtgagcacttagcttagtaatgtaaaaatattgctaaaacgagtatcttaaatcacgtgataggtggatcattcatatgtggtcccgaacggatgttagggcctagtatatataccgctgcagtgacaatcggaggttccgattgtccctatgatcttttggccgagtggctaaatgctcttatgtgatcagctaggcgcagcggcctaagaaaccctctggattacaattttgtgtaatactagtcacgtgaccttgtttcttttcgcaaaaaggtgggtccatacctgatttttactatatacaggttttgaaccttgaacactagaggactgcgtactataggggttcacattactagtgtattctagtgcgagtgttgagaaacccagccagttcttagtaactacgtgggatccaaagggaaggcaaaaaaaggcttctcaatgtcgatccagccggaatctaaagactctctatttttatatgtggtcaatctagccagccaggccccactgcaacagtactttccaacctacaggaccctagaccgatccaaaagtactgttgcacctagaccaagaagattaaagactacacccacgtctacagaggcaccctcattaattggctcaatttaaccggatatcgccttgtttggaggtgataaaaatcccctaggaatcttagcagtagtctagtaatatagtaatacaaaatttagggctaacacagaatatatggctcttttcaccataggaagtgcaaatatttagtggcgttatattatcagcgttattgaactctttggactactcagcatcaatcggagcagacctggaaattatttaatatatcctcctgattcattttccttgtggaatttctagttttatttctctggtcgatccatcaattttcaggatatgcatagacgtattgattaaaagccaaaccaacaagcctcaacctcctattaatattttaattaggcttgacagtacttcctgaggtacctccatatgagcaaagtcacgacctacaagatgatatgaaaagaaaaaaccaacaacaacaacaagcaagaagcgaacaaaaagcaaaaaagcaaaacgaagcagaaaagaaatcaagaacacgaggcaaaatgtgagcggtggtaaaccactacactagaataatcccaacgtccgtcatagggtcatcctctgctgaaacgtccttagacacgaagggggggagagagatgacctcttgcataatgtaggtcaagagatcaactaccttaccgtagtttcttccgagggctcggtgggaaacggttgtccactattcataaatcagacacttgccctcagtagtaatgggataattggaccatacctcgctgtcattgtttatttggtgaaaatgaaactcatctccatcactagccatgccgtagacaactgtattgacctttctcagggtcttacgttcttggtgaacgatacctaggagaaaaggggatggttagaaaagtactgttagacatagtctattaagacatacccatgtagccaaggagttgggcctccccagcgctcaccatacccttcttcttggcctcaacgataaccaggttaatcgccttttctgacatcgcacgggtttctccgtaccacaaagtgtaatccgcacgtccgctggttttgtactacctcgtatcgtacaggatcgcgcgagaggtcatgcaggtttcgtgttctaggttcaagggccattgcctatggtcgctagacgcagagacctgatccagcactgagtatagtagaatgtcaatgacgcatcgtgctgctgtttctttttgagtgctgcactagctgcctctttgaactattcctaacatttcgactattagatgtcagtatgtggtcactgagttattgtatccatatgaccaggcagaactgagcaaaatcagggcaatatgtgggaaaacgtaggttattgggatatagcctagccgaaaagtacttccagggaagggacttacgagcacactgtgggagaggggctcctggagggggatgcatccacggggcctggtctgttgggtttggcgttaggcgaaaagcgacttttacttcctttcgggtcattttcccaatggggacctttgggagagggagtgatatctgcccatgttgttgttcggttttggctagaagtgcccagaactcatccttttgttctagtctcagacattctttggcatcctggtatacctgtttcaacaagagggaaggatccttaagtaagtctgaagacggggatatgggggtcggaaattctgatgttggcgaggaatccaaagaggaactcgaagatcctggagacaaatgtgtacccatcggatacgacgatacaggcgccgaagacatggatttctgcgaagaatatgaggcttttcggggcatgattgtgggttaaaatggttgttgtgggttggaagacgaaggggagggaaacgaaagaggaaacagatggatgagggtgactgccaccgcgacccaaaaaattacctcacctcatcgacactctggccgccttcctttttgttcacaattggcaaagaaggcttcggaaaaaccttagtattacctcaggtcttggtatctagaaagcttcgtacgcaatgtacccctttagctgacaatacttttcgcgtgctacatacatgtatccgcctcctttagacgacttcctttcatcaggagtgggagttggttcataaaaaagaatactaccaccttctttctcctccaatatcatttagctcgcctaaccatgaggtataaaaagaaatatgtactttgtagcagtagagatggggataaacgtacgatgtacaacatatcggcactttgctttgagagcgccgatctcagtcagccaccgaatgcgataaattagcttaaggatagagaaaagcagagaaacagaaaagacacagaagagcaaagcaaaagcgatgcagaacaaagtgcaagccaagcgaaacggaaatatcaaaaagaaaaattatcatgcttccttgaaagagacgtcttcaggaggcaaattctccccagaggctgaagcagggggaatggcttttcgggggagtaaatcagggccgagcgttacacccacaaagtccaaatgtacaacgctggtccacagaacccacccttcccatgacatctgtaggataaagaaaacagaggcatcggtttcgaatgcattgcaaatctcaacttccatgttcgacgggagtgagcgaacggcttttgaaaagtcatccacagcgtctcgttgtccctcaagcgtcagcttcaccagcacgtgattttggctcactccagataatggccgagggaggcgggatcgactagtatcactgaacgcaaggctgattgctctggtgccgctaaacgtttcaaacacggcgtggggagcatgcttaggcttctcgacttgtacttgctggtaccactcagccgttgtgaaattctgttggttcttaaacttttggacggcacggaacagtctttgggtaaacgaagcggtatttgagcgtacggacgcaatttcttgaactccacatgccgcaatgatgtgaatgttcgttgtcgagttgggctgccgtgctgcagcagccgcgtggcagcaatcgagtattaccagagaatccactgactgtgcagattccagagtacctctgatagaccgccacagaattcttttgtgacgtgacgtaaagcacaaagcatcatcatgaaggccaccatgaccaacataaaagaaaatgaacagagagggtagtgacgaccggatacattgtccaaggagtttgttgagattctcttgcaggctccaggctggtgttttgtccgaattcgggatcacaaatctgttacattggaccccaagcggtttcagaattgattccattgtcaccatatcattctctgcgccagtttcatcgttttcccaccggatcaatatgccaatctttcgcacatgaaacttgctccgtgcggaagctactttcttcagcgctgcttcaaggtcaggaagctttctggtcgagactggtttggttgggaatgagatggggatagtgcttgggcttgcggccgcaggttgctttgcgggtgactttaagcctggtaactgcgacatcttgctaagagaacaaaatgtcagcctgtgtataaagtgaggggactgatcttagcctcacttctcggtcagatgagactagcagggttgtagaaatcagaagggtgattgttgtttggcaaaaaaaaagtagtagtgcaaaaatcagaaggttgatcgttgtttgaggaaaaaagcaaggagagttaggaaaggggaggagggtggtgtttatatctgtgattttgctgccttcccaattgggcgacggcgaccatccatggattccgttggtcctgtcttctttattatttctattgctctcttgttcattctattgtcctcttgttcattcctattgttaactcataactctctcaccttcaatctctctctacccgcgcttaaactatgtaatagccctggaggtaagataccggaactctggggtagtgatatacaagagcctacaatgtatccaatcagtggcacgctaatcgctccactctaggacgcctaattctataaatgaaatcatccactgcccttaggattgatcgtagtatactttgttaagtatacattacggtgaagtccatgtcgcgggatagtcactagaatattaggcatagatattgtagtggggagcctacctccccactacaatcagtacatatcaccttttcttgttttttttcttttaaatgttgttcaggcgttatgttatataagcgagcattgggatttgaggttactgtcgaagtccaaggtcaatacatggtggagacagggtaattcacccagaatatcatatgacatttggtacctagcatgctatacaaaaatgtatattacagttagtcatcgatgtccgcatagattgttgaaaaagcgggttttgtcatttatgttagagtcatccatatcagtcatttttaccatacattggtcgtaccacagatttctgtcaggttctttaaaggacattttctgccatcaagaaaggcatagttactctttacattccatgggcccggatcggatgaggttttatggttcttacaataaggattgctagaataggcatagtagttttgattctactatggttcgtcctaccctgtcctacctctatcaagtccctaggtctgaatttcttctttcttttctttccttttcatcaatatctctgcctttaacttcagcaaaaactctcacttatcttttacctttactaggccttgacaactcccatgggactagaaaaatttcggtcccagattcttagttaatcactaatttattttcgatcgataatttaaatataggctattctactctaactcccttaaaggctaaggggtcagggaggtatagctatagttatatggtttatctcgtttctaataacccctaggcaggttcgtttttagtctcgttattcttattagattcttcttatactattacgtttatcaagactagctctttaagcttcttaatcctttcctcttatactcttaggtagggtagcggctcgcttatagtggcggctcacttaccgattacgttaactgagcgggtctaatgattatataatagttaggggcgtgttcagttttactcagtaagcaaacagcggcaaggggtgagcactaaaacagaaagggaaagccatgtcgcgaggcctaaaatccggtatatatgtatgtccgctcaagtgaattatacttatattgcccacgcaacggccacaaatgtacatccgatcaatgtagcgtttagtaaggggaatcaactctggcattctataccagcagttgtataaatatagattctttgctattttagttttatagtttgacattgcgtgacgtattcccaaggagcatgcgattgtttaagtgaatcgtacggtgtagatgatgtttcagcatggcttaaagggatcgaatcatatactgtcgtgatatggtgtaagagaaggaactgtctatctagcaaatagaaagaacatttaatgtctaagagatcatagagtgatatcgatgtaaaaggatataagaaaggtgaaaggcggaagatcgtcttatgtaacaaatcctccattcttcactgttcaatttaggctgcttccaatacattattacatatatcccctttccctttctcttcccctgacatcttctgacatcttctgatatccccttgacactttcatcttcctaaaccatgtaaagcctacacaaccatggtgctctcgctgccagttcccggcttctccagatcctccacatcccgccccgccgatggcacgcaatctaaccgaaagtcagcctccggttctgaaaccagctcctcgtccagtcgcaatgcccggaagccatctctaggacagactggctcctctcctcacagctactccatcaccctcgaagcactacgaaataacccttttggcagtacctccagatcccgcggccccgtccagttctcggcccacgaaacagaggaacacaagcgggaacaggaggaactcaatacggcactcgagactctggttcgaatattccctgacgtacagatagaggtattccgcgagctgctgctacgctttgacggacagagccggttacaagtgtgtgtcgaggagctactcaggcataagaagaaatgggtttcggggcggtggaatctcccggaaggaaccacggaagctgaggcagagggaattgctcgcacagtccctggagacgaaaacttccctcgacaagacgttggcaatggcggcctggtcccccccgaggagcggtttcggttcgatgaatacaaggccgctgtgcggatggctatgacaagagaatataatggcctgaataagagtacagtggaggctgtcctcgctgaagtcaacttcagctatgctcgggctcgaccgacgcttcgggatctgtcgcgtcggacatggcgcgcgacattcaacagcatgttcccgtctttcaggcgaaagaaggaccgcgaagaacatccgcttctggtctggcatcgtggtgtagacggggagcttgttcctgttctgaaggagaccgggtgcagcgagctggatgcagagcttcacgagatgttgttagccccgctgttgcgacagaggcgcgaagagcagcatgataaggatttccgatttgcctcagagttgaatgcgaaggaagcgcaagaactcaatgccctttatgaatgcgagtgttgtttcgccgacgtgacatttgaacagattgcgacatgttcaaccaacactcatatcatttgttaccactgcatccaaagaaccgtatacgaagcattatttgggcagggctggggcaagtctgtcgatttagagcgctctactttgaagtgtcttgcgccgttgtccatcgggtcgtgcgagggatgtcttcatccggagatcgtcaagcaggcaattattctcgacacggctggcttcgagacatatcgcaaattcgaggatcggctctcctctgaggcgcttatgaagtctcagctgaagctcgttagatgtccattctgctcctatgccgaaatcgacccagtctaccacccttcgtcccatggtgtccgctggcggttccgtcgtgacggtggcattattcctacgattttgatgacccttcttctcctggatcttatcccattactcgtaatccctgttctcattctgctccttttggacccggccaccgtaacagcggtcttcggaaatgccattcgcaacctctgtctcaagatccgacctaaacgattcacatgtgccaacccctcctgctcacgcaccagctgtatgacatgccagaaatcgtggcgagacccacatgtgtgtcatgagccgttactcctggacttgcgcgctaccgtcgaggctgcccgcaccgccgccgtgaaacgcacctgtccccgctgctgcctctcattcgtcaaatcttcaggctgcaataaactcacctgcgtctgtggttattccatgtgctacttatgccgcaaggcactaggtccacctgtacgaacacccgcgcctgcccgtgccttccgcgggttcgatgccttcgatggcccgggcgatatacccgatgatacctttgacgaacaggtagttggcaacatgtccgaggatgacgaattcgaagaaccagaaggctacaaacacttctgcgagcacttccgcatcaacccagggtcccgctgcaccgaatgtaccaaatgcaatctatatcaagcagaagacgaggaagcggtcgcccgccgcgcaggcgagaaagccgagcgtgaatggcggatcagacaaggtgattccggtgccagcaacccaacttcgacagctgggttccgcaacgtgaatcatgatctctcggcaggggccgatggccactccacgaatggccgcgcgacggcttcaatttgggacttgcagcttacctcttcgactaagccgtgggcttactggctcagtgatgtgtgggctgatggacggtggaaactcgagggtcaggcttttgcggactggattgtggaacgggtcatcgaagttgacgatgtatgatcccgggtctacgttcggctacacctttgagaagattttttttcgccttgctttttatttcgggctgcatcttgcaataatggcgcttggtttattttttgcttttcaacccccggtactctatgcagagtatctggggtgacgtgcagtcaatcttatttgtttggagggtttcagacggtatgatgattgatgacactccctacttctgtttgataattgtgtgacttcttactaccaagatgtagcgaggacccttactttctttttaatgcagatcttgattttgagaccagtgtcttctactcctaattgaataaaggtaagctgtcttctctctcttcgggtttcaatatgtcaagtctttgcttccaattccgagggatttgtaatcaatcttctgccagtataactatcgcatcaaatgtgaagttattcattgtggtatacacaaaatgcttcatcccccaggtatttcaggtatctcaggtgtttcaggtatttcgcatcggatcagagagccgctggtcctctttcagccagccatgcttgatcgccccgtcctccgcaatgtgtcatcgccgtgaggaagctctaaaatcgtcggtcatactcccgacaccagtcgtccaggcctttaggccagtattctggcttttcgatcaggagcaaccaggatggtgcggaggaaaattctaccggggctgccgatagtaaatgggcttgtgctattattagcactgagatcatgcacggcacattatattatttctattgaagtgaaaggaactgaaacaatggtctatatgcttttatcagccaaagtctccatagagtgccccggcttttcgtgagctctcagacgattagacctagctctctcttttttcttcgtccagctctccattgattcgcttttttccttcttccttcaaagcttgatcatcggctcggttcaaaccaacctgtggcatcaacaaagcagccaaaaagaaagcaaatgtcgcaagggatgcaccaacaatgaaaatgatacggaagcccttttgatatgccggtgtcagcactttacggacatgctcagaatcctctgcagataaccttgatagatagctctgtggacttgagagaagagagcgggactgagattcgtcgagattgaggaccgagatggacgacgagacaatattatttctatattggttaacaagagaaccaaaaaaacagaattgaaagaatccttacatgatagttccagcgacggcgagaccgagagtaccgccgaggtttcgtatgaaactgctcacggttagctctataaaatgactgacatcaccatgggtgccactcacttcctgaatgaggttatcacagccatatcccgtctttcgacaccggcttgaacggcaatgagagagctataatgaattagtttaattcatttgactaggataggaagtcacatacggctgaagagtatttccaaccccgacaccagtcaggatgccatacccaatctgctttcccaaccccgaatgctgatcgagtgtcgagaaaagaccaagaccaacagcccagataatccatccaaaacagatgcattcacggtagcgaccgacccagtgtacaacaagaccagaacctgtactgctgatagctgtggatgaagtcagcatagcaacgcaaccaagaagaagaggactcatactttgcatgagggtaatagggagcagcattgcagccgcttttaccgtcgaatatccaaataccagctgatagaaggtgggaatatagtagatttgcaccaaaaagttccacccgttgatgaacatagtcaaacatgcgccattcacaatcctaccctggaagatatgcataggaaccaacggtgtcgaagtacccttccactgccacgcaataaaggcaagagagatggcgaacccaacgaccagagtcgcaataacatgtgctgagttccattcatactcaccaccaccccaagtcaaaccaagcagcaagaccgaagttcccccgagagcaagaagggcaccaaagaaatcaattgccttcagcttaactttccagttgccagtaactttccgaaggggcataaagaaaaaaacagccagcgtagttaatgcagtgagaggtagattcaagcggaagatccatcgccacgagtcttgtgaaatggaggctagtgcacctccaatgatagggccaatgccattggcaatagcaacaacggcacctagaataccttgatatttgcctcgttcacgaagaggaacaacgtcgctgacgatcatttgtgcgactgtcataagaccaccgccaccaactccagtgaaagcacggaagacaatcaattgcgtggctgtctgcgcaagggaagctgccaatgacccgaagaaaaaaatagccaggccgacgaagagcacaagcttgcgagaccagatgtcggatagttttccatatagtagttggaaacatgttgatgttctgtgtcacgagtgttagtatcgtgaatgcaagagaaaaaagactactcacacgaagtaaccgcccgaaatccaggaggtctggtcgctggctcccaattcatttcctatgatagataaactggccgccagcgtcgtctggtccatcaatgccagaagatcaacgctagaacatgccaggaagatctaggggctgtcgttaattgggccagatattgcttgttactgtatctactaaccgtgatgatggtgcgcttaggcacgtaattagtttgttcgttgaaggtgacattagtcccattcttctcaactgcaacagcctctgttgagtttgaattttccagtacccctgtcatggcgtattgatatcatgaagggataggaaagtaaacagcccagatatgcggtagaaagagagaaagcaaaaaagagaagagcccaagcggactaatcaatttcatctattcacattcgtcattcactgattcattgatcagcgtttagtttgagcaccttgacagaagatctgcgcattagagttggcaaaacttctcaaacaccctcaagatacccgcccctttataccatgtacctcggaatacgggaatattttcagctgatagaaactaaaggtgaggacctttgtgatcattgaatcaattctagaggaccttgtcagactatgtgacatgtgagaaatcagattcaagaacatcgcaaggtacgacgtcaagaataccagagcatgacgcagccacagtacgaattattccgttttcaaccattctatatccaattcctgtgacaaagaggcttaccttcatccgtacagagagttggatctacacttgggccgtgtcaatatccccgagatcgctcatgcgatttccttgttcatcattttagcaaatctccaagacttcagcgtccattcatggcatttgaccctcatattagtcgactcagtagtggagtacgagtagatcttactcactacctcttggacgccaaggaagacgcaacaggatggaggggaggggcaaaggatgaacgctgtagaatttattctgtataattgcccagagtgacccgggattttcttcccttatatctgctttcgtcactcgaggagattgtatgctactcgactagtatcagcatctatatctcgcaccaagtgtgtttcaacaatatggtcaattcttccgagaaaataaccaatatgaacgagcacaatgtatacttcggcattgactcgttgaagaagtacttcgatccggactgtcagcctcctttgcctcttgtagagctgccacctcatttgaatccttatcaccaagatggggtacggatatatgccaaaatgatgaccatgcatccgactaacaacgtcaaggcaatgccaggtgagaaattcccgagagaacaccgagcatcaattgcaagctaacacgagaccagcattgaacatgctggaatcaagtgttgtgcccggcgagacgaaccggatcatcgaatacagctccggatcaacagtgatttcgatgtcaatggtcgcccgagtcatgcacggagtaaatgacacccgggccttcctgagcaacaaaaccagcgatgcaaagctgaaactgatgcaattcttcggtctcgacattaccttgttcggtggaccatctcaaccagagccattggacgaaagaggtggcattcaaaatgcccgaagaatggccctggagtcagaaacgattgtcaatcccaatcaatacgaaaacaacaacaactggcagtcccatatccgatggaccggtccgcagatcttcaagcagctgcctgaaataaacgttctctgcgctggtatgggaacatctggtaccatgaccggtctggggacctatttcaaagacgtaaagccatctgtctaccgacttggtgtttgtacagcccctggtgaccgggtacctggtcccagatcatatgctctaatgcgccctgttgagtttccttggagagcagccgtggataccatcgaagaagttggctcggccgaatcctatactctctctctaaacctatgccgagaaggattggtctgtggtccatcatccgggttcaaccttcaaggtctctttcagacgttggcaaagcgcaaggctgcgggaactctatctgagctcgcagggccagatggcacaacccactgcgtcttcctctgctgcgacctaccatatcagtacatcgacgagtacttccaaaagctaggcgaggagcaatttcacccaatccggaacgaggtaaataccccctatatgacgtgttggcgtcttaacgagtcttggaaatagaacaagagttgacctatctactatttaccagcgcctgacaaaagttgacctgcaccgatatgacgagagctgggagcgggatgcgttagatgtcttaccgcagttttatggatcaccgcgatcgcttgcgcaaagcctattgagcgagattgtcctcaagccgcagaatcacgttctggacttgcgccaaaaaaatgatttccacgcgtggcacctccccggatcgatacatctgccattgtctagtgttcgacctcacagcccgtcaccgttctcggatccaggtgttctggaggcacaatgggcggagctagagaagatcttcaatgatgacgtctttgtctcagatctgagacggcatcaaatcctcgtggtatgctacgatggggattcggcacgcgtggctactagcgttcttcgggcgaaaggcctcgaagcagacagcgtgcgtggaggccaccgtgcgctgaggatgtatggaatcgggaatgagagcccgatctccgttgagaaggggcctattaaggccactgtttctgtggcagcggttccccttgaacagagaacctgagacccaggaccgtagcgcaatcgactgggaaaatgcggaatgtagggttggatttgccatgtgaagcgctagtcccgatgcagacatcttgtacctcgtttttcccccttcttttcttattttcttggtcttgttttcaattacttcatcgatttggttcattgtttggcgcatactaccctatgactctttcaatgagaatattgttttgactccttttctacatcttcccacgcgtaagagaccagtgtccaccttgtctctccgcatgcgttgaatagctcgcatttgagagaatcccggaatattcggaagtcatgcaaggacatgcatgatgtatgatatttgacgaggggtgctgacccccacacggtgtcagatgtcagatccaatttatatcaagcgcaaatgtgctctagtccaattagcctgtgatattccaaccaaccacgagtctctgaatgattccaggccccatatctctatgaaatgtgctcaattgtgagcagatcccctcgggtgatcgctgggaataactgaaatgactagaatgttaattcaaaccccctcgacaggtacaaggagaataaaggagatatcccgttttcggttccgccacccaaaaacaaacttgctccagatctgtcgatcataccttatgtattccatgatatctgtatttccttgaccatacattgtaggtattggtatcacttattttcggtcacacaaaatgatggacatgaagatggccgagggcacaccctggctcgatcagccggtgatgcttcattcgtctcgcgccgacaagtgcaagctgaccgagtctcaatgtctctatcgcaactatcactggcgatactggtatgcatgttcttccgagtcacctccatgtatgtgtgcttatcggaaatctgttctaggtaccaagccgaccatgtttacgcattgaacaccgtctacttcatgtgtgcggtgattggggtgttcgcgatctcgaacttgcttgtacgattcgctccagatagagtgaaacggaccagaccatggcgcatgttcacctctgcctcacgatacctttcttatcgtggatatcgattgcctgcgctgcgatattggtctccagcattaggggtggtgattctaggtgctgtaggcgctgtcttcttcttcggtgggtgtcttggacttgcgaggatgtgacggggatggtggttgacttctttatagcgatgacactcggcccgcaaccttattactggccaacagatgcttcttatggaagtagtcctccgattgcgactcgatcgggctggatggctcttgcgctgcttccatttgtactgtgggtgttggattcggagcatacaagtcggttgctgaccttctttagggcactgagcacgaaagctaacatgatctctggcgtgaccggtattccgcatgagaaacttcaagtgtttcaccactggactagctatgcgatgtttgtgttggccttgattcacaccttccctttcatcatatatcatatctggaagggggatatgatgtatcagtggaagacaagtgtcgtttactggacaggggttgctgctctcatctcacagacatatttaaccctcatgtctttgccatttattcggtaggatcacacctacctagcttgactactagaagactaactcttccacagcaatcgattctacgaattcttcaaagccacgcacatcttcgtggcagtggtatttgtcgtgtttttcttccttcactgcgatttccggctctcttcttggtaggttcgactgcaataagccccatgatgacctcgcattaacatatatcagggactacttcatagcctcaggcgtgatctatttcttaagcatcatagccagtcacatccgtacctatctaatgcacggcatccacaacgcgaccatcgaactcgtccctagcggtcttgtccgcgttgcagtcccatcaatcatcaaatggacaccaggccagcacgtattcgtgcgcttcctcacatcagacttacacctactcaccgcccaccccttcaccatctcctccgcatgtcgcaatccagacgaaataggaaaagcctcagaactagtattctacatcaaaatccgcagcggtgtcaccggacgccttggagcaatggcatctaagaatccaggctgcacgaagaagatattaatggagggaccatatggcggcgtcagcgaacctcacatggcgcgattcgacacgattttagtgatagccggcggctcgggaggcgtgttttcactagccatggtagacgaagcactccggctgacggggataaacgcaccggcaggcgagaaacaagcactgtcccgccggaacctccaagtcgtctactcgacgcgcgaccacgctatggtagactggtacatcgatgagatcaaatcacggctgtctgagtcggacatgttatccgcgcagtcggacaacggattcgagactgcggtatctgtgcacataactgacccgcagggattgggaatttcttctgcttcggaatctgacgatgttaagagcacgtttggtaaggtgccgccggctgagattaccactgcggggagtttcagtttgaatgttcaccgcaatgctcggcctgatattcctagtttggttgcgcgcactgttgccatggcacatgttcaagggacacatcttcagaagaagcagcgggttgggattttggtttgtggtcctgcttctatgctacatgatactcggaatgcggcggctttggcgcaggccagggtgtttgggggtgagattgaggagttgtatttgcattccgagcctttcgtgtaagtctttggtttccttgctatattatgactattggctaactggtttctacaggtggtgagtgctatttgatacagagtagcatctgctggattgatcttactctttctcttctcttctaccagtttatttattgcttccaattacatacgtttccatctaagacctatgatttgctgcaaccaaaaagaatcgcataattatctcagaaaaggagcaatatccaaagaaatccaatttattaacggccaagaccctctaaaccagtctagagcccgagtctatataaatcctaggttaatacacggaaatgtgagtatgaactaaatagtacagaaagatataagaacaatcaccggccagatataaaacaaagtctggggatatgaaacaccggggccaaagcccaaaagaacaaagacgccgaacattgatcccataaggctgagtggagagacgagaaaaaacgtgagaccaaagatcaaccaagaaatgcaaatctaaacattaaacaaaatcaaaacgaagagatcgtcaggtcattaacccatcaaatcctaccttccacgcttgtcacaaggatgaacatattttcttcctctttggatccttgagatccaatcaatgccaaatcactctcctctctcgattcttctcatcaacgaatccctcatccgcacattgaccacaccaccaacaccgtatgcaggaacaatcttgcccatgcgcgcaaaacaactaggcacataatcgcgacgaattcgcgccaaacggtctgtccagtgcaggccaccggccggctgtcggttatacagatccaaaccgaggaggtgcatgggtgtactagcgaactgcatagcagcggggcaggcaaattgcgcgatgctggatttcattgttgggcttgaagcgaggaagtctgggaccgaaggggcgatgagggcggggatattgaaagaagcccagattgtgatgctgtcgcggagacagaacagggcataggagacttttggtatttggaggtttggtgctatgggtgcagagggagcgcatggtgcgcgcagagcggagctgtacttctgcgcgactggatttgtatttacggtgacgtttgattcggagggaggagaggcgccgaacattttggcgaagcgcgcatctttgtagacgcagattgtcatgttgactatcgttgttgcgaagaacttggggaggcctgtgtcaataacgttatagggctgatggtgtgttgttgatcggagggtgtcgattgcgtttgctgtgaggtaagtcgaggtgtacagggtgtagatgaggatgaatggagtgctgaagaagaagccgcaaggtcgagcgaccatcgatcggagcccattgttgatcgtttggcggattgggaagcctttcgaagccttttccataattgcactagaggaattagtcttcttttcggtaatagcacctaagaactatcgtaagtcacttaccgatcaatgatggtgatcaatggacaggtcagcgcaccggctgttgctgcactagcgacatcgacaccgattcgcttgcccaggtccttggtattccatgttgaagctgtggagcgtttgcttggtgcctgtccttgacattcctgaccctgttcctttactgtggccattgtaaatattgtatcttgtacaacagcatcccgattcgtgctcatgtagtatagacgagaaacaagttatgcattgagtaaaactgtacacatgataaggtcaaatgagacaaaatgaattacgaataagatctgggggaagatttatatctatcgttgatctcccccagtttcggacgacaatgaaccggccgcggtccggcgccgaccctccgatgccggcctagcttgtcggctaaacgctgttccgttttatacaggcaggtgtgtgtatatcattgtttttgtgtacattgccaagatagatacaatgaactataggtttgcttcattatactctgactctcattttaaaatcacccaacgccatataccaagatcttaactacatatctagcgagctacaataccatccatagtgacatggaccgctccagcttgaaccaactgagataaaggttagcagaaattcgacttatgcaagggacacacataatacataccgctcgttgcaagtcatcaatcaggtcatccacatcctcaataccaacacacaaccggatcaagtcttcagggaaagcgcgctccgcccgtgtcttcgcatcaatgctggcatgactcatacggcacggcatactgatcagactgttgacacagccaaagctgacactgatagcccagatcttggcgctctccacaatgcgctcgctaatggccgtgtcaccggtctcgaacgagagcacagcaccggcgccccgcgccatggacttgtggagttcatattgcgggtgggaccgcagaccggggtagcgcaccttgaagccaagggactcaaggaactcggcaatgcgctgcgcattgctctgctgttgttccatgcggaccttcaacgtcttcacgccacgcagcagcagccaagagtcgaacggcgacaagccacatcctgatgcgttgatagggaagtataggcgttctccgagctgcaggtcgttcacggcaatgacaccggccatcaggtcgtggtggccggagaggtatttggtaccactctcgtagactacatcggcaccgaagtctagtgggtttaaaagaaggggagacatcatagtgttgtccacagagacaatgcaggctgggttggcttcgtgcgcggcggtagcaatttttccgatatcgacgatcttgatcagcgggtttgtgggtgtctcgagcagcaccatggttgtcttcgagctcaggacctcctggaccttctcaacctgtgtggtatcgacgtggtgcacgatgattccaccgttggtcgagaggaacttaagcagacggttggtgccgccgtagaggtcgtcaccggtgaccacctcgtcaccgggacggagaagtcttgtgatcacgtccaaggctgccataccggaggtcaccaccagggcgcgccgtgccgacatgatcttggccaagtgacgctcaagatgtgtgcgagtggggttgccggaccgtgtatagtcatactctccaccgccggcgttggaggtttgtttgaaggtagcactctatgtgataataatcagcatttatgtccaattggaagtaatattctatcaccgggtgtggatatgtacctgatagataggaacgctgctggcattgtattggtcactgccctcggtgaagaccagttcggtggcaatattgtaccggcgaccggtatgagggctggacggggcaggggaaggtggaaggtcattgcctgacaggtcaacctgagggaaacccttctttacaccgctggatgaccccgaggcggcattgggaattccggatcctgacgccgacatcgttgtagcggggcagaaagacgggagagagagtgtgtgtgtatatggagggtaattgaggtgaattgaaagcaaacaagactcaaaagatgcgaatatgccgaaagagaaagggggaataggaacaaaaatcaaaaagaaaccgaagaaaccccaagcagttcacatcttctctccccccggaccaagctgactcgtccacgtcggcgctgattcgtcgagccacggccattgcgatctcgtcatccgctagtcccgattaggcatgcaggtatgtggagtttttatgagtcaaacaatctacgttgattaactaactagttcacgaagtttgttagttatgtccatggtgattatggaagagttgtacatagattgagagaggcaatgcccaatgtgaaaatggagactttaatatcaatgttagtatagcttagctagacatctcaaggcttgcttaaatttattttgatggtttccatactgctagcgaagagatatatcaatcgaaattcaattggaagctatgtacggatatatgactattatgactagccaactactctggacatactctcgttagtcatcgacttggcttgcccaggtgcccagatgggacttcccacttttctcctcatctctacatatatctatccacttgcacatgcctctactgagtctggtgtctggaatctgaaaattattcaagcctcttcaataccgtagagaggaacaacaaaaatggcatcggcatcggaagcggcattcgcctatcacgaaccgtcaatcaaaacagtcctcagctataccagctttctcttgactctgaatatagccaatacctgtctggacaagcttctctactgtggttttttcggccaactcttcatcggtgtcctgtggggcacacttggggcacaatggatcgatcaagagacagaaagagtgatccagcagattgggtatttaggcctgatactcttgatttacgaaggtaagtgtgtgacattttgtcaacttgctggatatatctacttacaataaataggcgggttgtcaacctccatccagtctttgaaggcaaatattctactttcaactgccgttgccatcactggggtctgtgtcccaatgggcttttcattcattcttgaggagcttgcttgtgtcggccacccctcttcagtccttcgctgctggtgcagccttgagcgcaactagtctcggcaccacctttaccattctctcaaccacgcagctgacaactacaaggctcggcacagtcaccactagtgccgcaatgctagacgatgtcgtcggtctagtcatggttcaaattatttcaaaccttggcggaagtgccacctcattcactactgtgactgttattcgacctgttcttatttttatcgggttcgccgttggtcttctattgctgtgtgcattctgtttacagccagtattaaagaattgcttggttgcaaagacaagttccctgattttatgggaactacagaatttgctttcctttcacagacgtgtgtgctagttggcatcgtggctggtgcaacatatgctgggacttcgagcctctttgctgcctaccttgctggagtgattgtctcttggttcgatgggctgatagctgaagcgaaaacacaatttcccgccttgcggtctgctgaatctcacgggaaaactttgaacgaacaatcgcgcacacggaattgcaaggatcgtactgaagagacaccctcttcgcctacgcaacctccacaggcaaccgaaataacccctaatgatacacctacaggtgaactcatatacgccaaatactacaaagagccggtgaaccgaatccttctccctcttttcttcgtgggtacttccctttgatttaggaaggggcatactaacactagtaggcatccatcgggttcgcaatccccataaccaaaatgttctcaggccaagttgtatggcgtggaattatttaagccatgctaatggcaattagaagaatgatctggctggtgcgattctctccgagccctgtgtcgcgtctggtctctatcatcaagaagccatctacatacgcccatttctactgtttaggtccttggactgccagcagaaaatcaaaccaaaagaagaaaggcccacaaataccagcgactcaagatgagagcgcagatgttcccgccccggataatgccaaagacgagtctcagtcaacgaacagatcccctgcgcccacttttcgccccgattcccgtatctcgctccccccgaaaccaaagtccttctacccgccttctatcctgggattggcaatggttgcccgaggcgaagtgggatacctcattgcttcaattgccgaaagcaaagggatattctccaatgactcttccgaaggaccatctgatatctatctagtggtcatctgggcaatctccctctgcacattgatcggtccgatcttggttggaactctagtcaaacgtgtaaagaagctgcaacagtcaagggtgaatatggggctcgatcctttgggagtttggggaatctaattatctcggatacagtgagcgacgaccatgctatattgaagcccacaagcgataccattggtttaatgacaataatcattctgatatgaatggtatcatgctaatctccaaaaacacagccgttcagccacccatctccataatccctccattcttgatatgagccatgtcgcttcgggtaatgggatccttcttgtcaaaagacacctttttgcgttccgcaggagtccaagacgtgatgtccttcgaatcaccacccagatgcccatcattggccttcttcagcttcgctaatacctttgcccagccccagggatcattggcattggctgtggcctcgggaagctcaaccgtctcatcagacgacttttcgtagcgcgggtggttcaagccatgaattgtgacatcgtgcttagcagcataagcctcaatcttcgcgccatggtcgccttggtcgataccgtactctttgaaatcaacactgaagcgaatgaacagaccgatcatggctccgatgttctttacctccgagtccggcttgaagagcccatttcgctccagagtagcaagcatagtaaggaacattgtaccgaaggcgataaacaccgcattcacggtctctccgtcatcgcagctatttattgcacccgttagcgttccgtcgacacctaatattctgctcggagccagtgagacaaacccaaccatcggcatgatagcatccgtttggaaatacagccccgtcgcttcacagatggcccactgcatcttccagtcaccagctgcctcgtcaaaatctaggagcaggttctccaccaactccataactgcatatccaaggaagtcattgtagacatacatcccgaagttatccgggtcgcgtgcgatggtaccttgctgcagcgtaatccatttagcgatgccggcgtttgtgaagatccatttctctctcgggtgctccgaagcaggttcgagggctgtggctttgtccgcctcctggtatcagaatcagccactatcccgcactagagaatggtatttctctcctaattaggaagtcactaaccgcatcatctttcttcttctgctctataagctcctcatcttcctcgtcctcatcctcagactcatcgtctgtgctttccgtcttccaaggcgcgcgccccagacaaatataggagaaagccttgactgggtctcgggttcgcaatttgaactctgaagccgcgtttcgggagacagagacgggggcccatcgcttattcagttcgcgctcggtttccatgtctacttcagagctgtttgctaggctcttggacttttttggaccactagcggcggactcggttgattttctcttgggaggcataatggaagatgatgaaattgaaacaacggcatagatagaaggtatatcaagttctaaattgtgataggttgagtgggcttatttaggtaaatacgggtgacgcgacttgacgcgtcgtggacacgatcacaatgagagttgacacctcaatttggtagaataatatatttgtacaggtatgtgaacacaaagaacataatgaacacaagcaattgaaatctgtatatactccaactccctctggatgccagtccatgaagtttcccgaatatgatccggatcacagaacaacaacaaacgtaagaaaataacgaaaagtcccaagatgtcactatgaacctcgtccaaggaaattcataaaccagaccgtcataaagacagaatagtcgagagaatcccacaacgccgcagccgaatccaaaccattttgagacagaaaaaaaaaaggaaagctccaaaagatgacagtatataccagcataacaattagattagagtctgcgaagggagcccggttatcctttgtactcgaaagcccccaaagtccactctcgacaggtaaagtgtgtgtaacagcatagaaacgaagcaaacatactccgtgattgtttacgccgccagatcgccaaaaccgccgttgatgccgaagaattggaacctgtcgcgtgttagcaaaagaatatcattaagaaaaaccatagaatcgaaagttcttgggatacttaccagtcctcgacatttagcgttgttggcgcagtcggcccgctacgggaactactactccaattatcattgtcctggctagcagcgtccattgcagatccactcatagtgccatcgagactgtgcataggcggccaggcttgctgatgctggccctccatgccgaacatctgctgcggcgggttgggatgcattcccatcgcgcccggcagtcccgacattatcggcgggctaccatgggagatagacatgctacggcccgagacgggctgcggctggttgttcaccatgggactagggcgcggggccatgccagggggcatttgggatgggatctggagggatgggtcgactgcggtgggctggggtggcgatgtcaattccgggaagaaggcggtgccatctgggaagagttggtcgggctggaagttctcccagagtgagggggagaggttaggagaggtgcgggttactaggaagaagtcggggggtgtggcgggtagagaaaattggccgttgaatggggttgtgggcctggtgttggctcgggaattacccgtgccggtcatgggatcgtgaggaacgcggtgggtgtttggtgattgttggccgccgggaggaggttggtttatttcccgggagggagtgacagccggtgtctggggccgggagcgctcatatgacacggggggtgtaggcccgccaccatttggcatgccgatatccatgtcatcaaatttgcgcttcggcggatcctgcctcttcgaggaagatgattccccgtgtcgcgtccgctgatgtctccggcctgcagccttctgaagtcgctcttccattactttgtttccgaggatagactcgaatagcgtattcaccatctttgccaccagccagacctttgacacatccttgagggctaacatgcaaacattgattctttcctggcaggtggccacgatcgaaggaaccgaggagcgcatttggtatacgtgcatgatcaaggctgagaacagactgtagacaatgaaggcgggcgtgtaccggatttccccatgagcctgtaggttctcaacgatggaggtaatcatgcctgcagcttggaaggcaattgttcgcgatggataagccatttcttcgaccctgtagttgttgggtgcggacgaggcaggcggcatgtgagccctgtgaagaagacagagtgtagtatagtaattagagtgcaagagagccgcccagaaatgatgccgagagcgttgccagcatacttctttgggacagttctgcagccaatcggcgagggccatatccgagtgggtgagatccattgcattcattcgccgtgactttgaagccacagagtactgctgcgacagaaccaagcccatgatctcgcatagcttgacatactgtaggaagaactggacatggacagggtctgctgggtattcggcgacaatgtcgagctcatcctcgatgaaatcatcttccgtcaccatctcaacatccgagtcatctgtattgattccaatcggccgtcccagtgcgacagcgacagaccgatcccgggtgaacagggtccaccatattctcttccagagtcttttgtctggtttgttaagctgggacatttcgacgctgcggtgcattccagagccctgtgctaccaccatagcgacccgtgtccagtagaagacgttcttcgtaacgtctatgactagtcagaaaatccatcaggatagactagtataaattatgaactcaccttccggtccctcccagtaccaacccaaaagtactaatgcctgcacgatggtgacacggtcatcctcgtagttagcatcatacagcgccttggcgcgtttataaaaggtcatagccgcaggggttgtcgagccattcgcatccataagctgctggttagtacagactctcgatcctgccagcagaatcgcctgcagtagtagcaacgacggcgggtttttggggtcacggtagtgacgcatgaagcgactcttgttgataatcggcacgacgggggccacccatttgaagtaggcgtcgaccaactcatcacacagtggtttaggtgggagcaggaatgccccacgctggtgcagaatatcgatttccaagttgtccaggtccgtcaatcgagcgcgggatcctctgatattaggtggaagcgggtagtgcacgacatctgcagttccatggcggtcttgaaccagaagagacagatttgacgactcgcccaagtacgccacccggccggcctcttttatcggagcacgggcaaacttcggcttcatgaattgggcataggcgttattggcggaagcttgttgggcagcctcagcctcggaaagggaagtattgggcatgccgtcgacgcccatgatgttgtttcggtacccaaaggcattgctcttctcatccaagtccgaacttttctccttttctctggatatagagaccgagccagataccgaattggctggctcctcagtgacagtgggtcggaagtgagaaactgcagcgtcgacgaccgaggcagtttgtggtggactgtcctcatactgactatcttccttgctcttattctgattgttcttctttcgtttcggagacgggatcttgcactcgatagagaaagcgacacaattggtgcaaggcaccccgagactggctgcatcacatcgaacctgcgtgacgggaatggttagagagtgggaaaaggggcgtgaccgagggcaaacccaccttgcgagcatgacatgtctaattgaatcgaaaagagaaacatcagctacaatttttcaaatccaagaaggggagagagaatgtatcgcgataagaaactgagccgaggtgcgttgaggacctcggccccagagtcgcgtctcgctagaaatctagacgtacctcgcacgcgcgtgatgcacgttgtctaagattagatagaacgaattagcaagcgcatcaaaatgcttaatttgaagaatctcccttcaggtacaggggaagcgaaacgccgaagaaaaccctgtccctcatcttgctttgcgcccgcacactccccccgcgacaatttatcagaccagaacaccgtgtcaccaatatcacaatagaactaaatggcaccgacggcacagacagcaaaaagagccggcttaccttctgaaactcaacggttggccttgtggaccattgcgcaccgtaatgcccgaagtccccgtcgagcccgcgttgctcggagccgggctggtatggctgtccgatagctggtcggtatgaaattcagtggtactcatggccacacagtctctccatccaggaattcagacttggtcgagtcggagaattggggggatgcgctcggaggagaaggggaagtgatctgatataagtcgaaccaggcgcacgggagtacggggtacggagtataaaaaggataggaaatagaatcttgaacacagcaaagacgccacgcgatcaagaaaacagaacagaaaatcagcaaataagaaaaaagtaccgggagagggggaggaggagagaggaatatcaaagttggggtgaagttggttgtggcaatatcaatttcctggtggagttcccatttggtcagcatttatgtttatgcattggatttacactggtttttatattcttatgttacatgtatattatatccttataatatgaagtacggagtactatatatattattcccttctatttcctactctctgcgttatctaagtaaaagatgaaaaggggtcaaggtaaccctaagaaccctgtactaagtccatatggcgcaggggttcacaccgaaccctcattaactcaacgatatggtggaatgcttctttgtgggagacaggaccactctacaagacattctatctattggcaagcccgggaggagtataataatctacatataggtgaagtatataactcttgaagtgagttcccccaatccctcaattgcgaatactttcaaggcatcccagacgctaactaaacaggaccctaattaggcccactgtgtggaaataccattgcttcagcctcccttcgggcttggggggattgtcccgactgaaagattggtttttcggtcttcggccatgacttgaaagaccccagatctctgcattagccccacgcctccaatgccgagtaaaatgaccacggtcagagcctaccgccacgcgggaggatgcggaggtatggaggggagttgacgcggtatactctcatgtcgggaattctgctcaggactgagctcggagacaatattcagtcatgggccatattggcgggatgtgcggatatatatgcagtgtgacctattgctgccctctggccaccgcttaaagtatacttgtataggggctttccagactatactacgtaaatttgggaattctcattatagcatgcgcgagtgttctgtttcagacatattaatcgagaaaggtactccgtagtgtgtagttgtaggtgtagatcattacagccgatggactcaaactgaacgatatcaaagtcaaaacggtgagattgcggggaggaaggtaaagatggggacgaaaatgacctggggagaagttgcgggggaaactccatcgcgtcgtgagctactccgtacgtactccgtgaatcaatgtaggtttttcagaggacttgacagaggacttgatggacgcatatgagcccacctgggcaagcttgtgatgcctcggcaacttttgagcttcgaccaatgagagtgcccagttggtctatttccattgaattgatgccccactctctgtcgctagaggatacatcatcatcatacatgtaaaaaggacggtctcaggcaccaagtcttttctttactaggcccattcgccggagatccccgggaagaaacggttatgtcatggacaatatttcgcggattgggagtaaatggaagtccgtcggtgagaaaaacagtttattgttgcaaagtgatatacatatcagtcaaatcttcatagagtaggtagggtctttgaactagtgccttttatagtcaggcggaccataaaataatatacatggaaaagaccaattagatatgaatataaccagccctatgcaagtgatatcgtgtgcgcagaggggtccctagttgcatattccaactatgaccacccattctttcctgatttacccttgcccttgcccttgcccttgaatttggactgtttggccccattagattggggtttcttaggctctttgtggtcctcgtggccacactctgtgatttcttcgatagtgtggattacggcatccccaacagctgtcgtgggggcgaagtccacaccgctgacaaattgctcactgaggaactccagaccggccacgaaggtgcagagggcgcttgcaatgcagaaatggctaatggtcatgccgatgtcaagccaggagccctcgtcgcgtaccatgaagaagaagttgagggtcatgatgtccgagatggccatgacaaccatgaagagcgcgctagggggtacctctaaacggcggttaaggatacccagattggcacttataatagcgaaggggatgaggatttggagaatcaagagcgcgccttgggcgaaggggtcgaagacggggataaggcgacgaacgctgtcgagggagaaggtcgagatcgaggccacattgccagtgctgaagaaggccgattgtaggaggaaaaagaagaagagtgccacgcggacatcagagagagtaagggcacggtagtagaaagtttcaccgttgacggtcgtcacgccagggttgttagctttcttcaaggcacctgtcgtgtggacataaatggcatgttccaggcgaacccatgtcacaatggtcatgcagaatacaaagtagaacagcccttcccacgagattgtgagaatgataaatgttggtgagaaggttaagaagatgatcatgagccgatgcagatagtggctattcggatacaaacggtggaagaatggaagcgtgagggaagtcactgaggttcggttagcttttctcggcgaagacatctcatgatcctagaacacactgctgtgtaaacttacctagcacaacccatccaacaacgatatttccgaaaggcaggccttggcgggcctggagagaaagcacagatgatctagtgactatgacggcaagaagaaccatgccaagctgaattcccatgatgatccgcgagccaacacgaccaatagcatttggttctttggattctgtgtcacgatgtccgaggatagcatcctcaaacagcaaatataagataccagtgaggaacatgagtaaaccgccatatgtgctgtgaacagattagccacatggaaattgttgccgtagaaagggatctcacattgtatcaaggttttcaaccttgattactggcagaagagtgaacgaactcatcaaaccgcagccaagagaccaagtcgcagacaataacggatggctgcgaataaagctaaagccatggataacaggccacaatgcacccaaggcaaagcaaacggtgaagatttcgcggtggaaatatgattgaaccattgcctccatgaccccgagaaatacaagtagctggagtccaaacttgaggtatccagtgaaggagcgcacatggcccaatacaatctgccgaccggcaatcagagccttgcggcgtgcaaaaacctcttcccagaaatacaccggaaagaatgcatagaagtagtagcgccaggatgagccctggtaaaggaacaccgagaacaaggcgaccaagatagacgagaagaatgagatactcgccgtcgtccgatgtgagtctgatgttccatgcaagacgtgcagatcaataaccgtggttagcgcatacgcaatccaacctaggtatccaatagagacgatagtccgtaagaatagccagtcatatgtttgtaggtagcgcagaccctcgagagcaacgcgaagaagctcggcagacaccacaatagcttcctcgtggtcaccactggagatgagtacctcaattcttgccagtctgccttcaatcgagttctcgtggtagcccgctagaggatcataaggtacataccggatcaccgcgtgtctcttttgctcctctttgacgcggtacatctccagaactgcctgggtgttggcaagagcggctaacgccttttcctccgggctcgcattgaggtagtctagaggcaattgaccaacggagttgacagggaagtcaagaccgactagataggccatgagcgcggcaacatcagcctgcgctacatcgtgtcggcggacctggtcgaatccccaatccgccgagaaaccatcttcgtgacccgctgcgattccgctagtggagagctggggctgtgcgacaccagatccccagacaaccaagggtgtccgcgtgttatcgggatgaccgtcaccatggctgcccgtgtcactcataccatggtctgcggtgaacacgaacgccgttttatcatctccgtagaaatcttctactaactttgtgacggcctggactccttgatccactaccttgatgttgtgtaggtattcgttcgagtaaggccggaaagagtgaccggtggtatccagtccaagcaggtggaggaagaacaccaatttgtcgtcccgtagtttccggtccaattcagggtcggtctttgccgattcgaagagatcatggaccttggagaatacccaagtatcaagatgcgtggcatcgacggtgaagtcctccgcttcttcgctgtacatctccgcatcgaccctccccggcacggcgccctccttgaacattggcaggatatcgggactgccccagctccaagtatgtcggctctggttgaacacgctgtcgaaattcaccgggttcatcttccaccccgtggtgactgaggacacatcctcataaagacctgcgataagcgcaacatggcctggtcgtgattcagtggggacgcgagtgtgcgagacaccgaatgttccgtgtgagaggaccttcgagcggataaacggagacaggcgaatcaactcgttgttttctggatcggcgtcgggggacgggtcagggaaagcttggaatgccttgtcagcccgtaggccgtcggcgacaaagaggacgagacgtttggcaggtgcggaggctccgggtaatcgctcgacaccatatgatcgcatgccactaacaattggactgacgaagtagatgtcaaagattgagtatgtatagatcaggtggaagaccactgcgagggcgagaaacccaacgcggccgagacgtgccatgatctatgcctcctagatattcaagcgttaaaggagtggaagtggtccactgccacaaagaaaggtagaaaaattcacaaaacgagagatatgaaggtcaaacacaacacgtcaaccgtcaacttgagacgcattgaggaacttggcggtgagagccaatcacaggcctccctttgtttactctacatagttacaacgttctgctttagcatgtatttaccggtcgaagctttgcaatatcttcacaaacctggagaaattgtaccttgaaataaatccagtattatgatccagaaagacatgtggtgctggtaaagtgggtgtgaggatttatacctccctcaagtggctcggagataaaaaaaagggatgttgtagtaagaaaatagtatctcgccgaggaaatctaaattcaacccgaatctcaacagactagtctatggaattatacgcttgagaatatgagtagcattgaggcgagaacttgaggtgccctgcaattgatgtgttgaaggagaaccttgcgaaacgtgtttcaccgggcgcaccgacagacgattaaagatacatacaaggtaggcatacaagcgccaagtgtgtagcaaccttggaaggtgaatttgttgacattaatgctattaaggatggaacaccatgacattcccagccccgaaatgaatagattcctagagaaacaccaacgattgacatgtactatcagtactgctattgcgctggaagagaccgccgctttgtgagggcatcaatgactcgcgtataaaacttggctgcttgtccgcggacgaaagtgatgtctacggtcaaaaagtctggtagcaggttgaccaggtcgcgatcgcggttagcgtctaggtgaggcaggtattggaactcggttttgtcgtaatcagtcgagacctttggtacgactagatggaagtgaagagctgtagggaggttagaaaaatgcgcacaattcctaggaaatctagcaacttacttccattgactccagtctggagacaatcgtataggtaatctaactctctgttcttgacatcacgaatgatcaatcctgttaaatcgctgtatagatcttcttttaattgagcgagctgtgaagcctgcgccgcttcggcggtggcagctgcattggcacgattggcggggccgcccttgatggcactgccggggacctttgcagccccctcgagactggcagctgtgttccgcgctgcggcaagcttggtctgcaaggctttgacttcagactgggcagacgcaagctgtgcttgggcctcatcggcgccagatttgagtcgagccaattcaacatcacggtctttgagttgcttctggagtccacgggtttgaagtcctagctttcgctgaacatccaattcagccttgagcgaagcaaccaattcattcgatgctaatgatgtatcagttcatctggcctagtagctataagacaacagaagagcatacctttagtaacggtctcactctgctttcgcagtttctccatgttggtgttggcttcgacaattccaatctcacgtagattgcggtatttaatctccaaggcatcatgcttcttggtcagttcgcctagccggcgcctcagctctgggtctccaccttgctcggcgtcggtgcctccaagcttgcgtttacgaggagaagaatcttgtgagttgcgtgacatggatagccgagagcgagcgttcttcacgggggacattgatttgcgattatatgccggttccttgtgaatggcagtctcatctccaagctccgttgcgggttggtcattctgttgagaatcttcgacttcgggttcctttccatcccggctcgttgcacgagcgagagggctgggctcttgctctgtgtgagtttcctgaaaactaatatttcgagaaccgctcggggtaaactcgaattcaccatctgttaggagctgtgtgctgaccgcacgaggtcgtcctcgactgcgtgctggggcagctctcgcggcctcgaccggctgcttctttgtattccttgagacaagtgagtctccatcctcctgtttgtcttcatcttcctgttctggtaccatattctccgcctcagttgcctgcacaggcgtttcagcgtcttgcgctgcacctctgggtcgtcctcggcgggcgggctttttgtttgtagggggttctggttcggctatagctatagctccttgctgctttcttgttcgagtagcaggtttgctagttttggtctcggtcatattctcgtttgaggtacgcggtctgcctcttcgttttttggcgggaggctcgtgggtttctttaatttctgcggcttcgacttgcatgatgtcctcatcatctgagcctaacaggccagagagtttggggggagctttccgtttgggcattgtgcagctaatcttggaagtataatcattgtttgatgacaataattgcatactcgcgggacgcgcaccgacaacaacacccaacaccgccttctctacccgacatgtgactggcatccccccgggtcccgcgccacaagctgccccaatgattccggcgactcggctgtcttgtcttactcctggtggacttcaatttacttttactgctctttaattttttgtttccacttagagattcttatttgcgccattattgcgctatatttgatcattcccttaccgtcatggcttcagctggccgaagatggcagcagttattccaagaaatggtgatggttgcaggcactgtgagaaagttcctgtttcagataggacagaatgcttctgacactattatagtctgcctctgcatatttcctcattcgataccttctatcacgtcttgatttcgacccagagagccagaagaaggaggaacaacgacagaagtccgctgctattatacgtcgattggagggtgggaatgaatcagatgatgagactccacggaagggtggtagacgggggaaggggcaacgaaagaaggagcttaccttgaaccaatacgaacaagcgattgcgatggatgttgttgcgccggaggatattccagtgtcgtttgaagatatcgggggacttgatgaaattatcgaggaattgaaggaatcggtcatttatccactgacgatgcctcatctttacgcttccacgtcgtctttgttgaccgcaccttccggggtcctcctatacggcccgcctggctgcggaaagaccatgcttgccaaagctctagcatcagagagtggagcatgtttcatcaacttgcatatttctacattgacagagaagtggtacggcgactccaataaattggtcaatgcagtgttctctcttgcgcgcaagttacaacctgccatcgtcttcattgatgagattgacgccgttcttggaacccggcggagtggggagcatgaggcaagtggtatggtgaaggcagaattcatgactcattgggacggtcttacatcggcaaattcaacgggagagccccagcggattgttgttctaggagcgaccaaccgcattcaagacattgatgaggccattctccgaagaatgcccaagaagttccccgtgacccttcctccaatttcccagcgccttcgcattctcggtctgattctcaaagacacgaaagttgatcgcgataatttcgatctgcactatctggtcaagactatggccggtatgtctggtagcgatatcaaggaagcatgccgagacgcagcgatggttcccgtgcgggagcttattcgaacaaaaaaggccagcgggatgcaaatggatgcaatggatccccaagaagttcgtggtcttcgcacggaggatttcttctctcgcgccggtggtatcaaggtcattcctcagcctgctccattatccactccgactggcaaagtctccgagaaggaggatggagactggagtactgcgtctgaggccacatcagaagctgagactcgacactctgtgatggctgagccgccagagtaaatgcgaggtacttttggtcgccttttgatatttattctccctttatctcgcagcgcgaagacttggcgttaatctactggaaatgctaggctctgaattggtgaatggccattttgctctagtatggccgacttgttgatagaatttctgatgtcatatgtacaatgggtttggatacaacaatctaatacaaatcttgctctttaactgtgttcttgttctattcacaatctatatacatgtacgtatgggggccgacaaagtaccgggtacacataataggtggccttgaccggggaaggtcatgtactgctacgaaatatgccacgaacttgcgacgtagtagcttcagcattctctctagggctttgtattatgtactccgtctgtacaggccaagacaattctattcaattcttctagttcttataattctcgtgggcaattgtcctgctttaaattactccgcgttcaaaaggtgcgggtcgttatcgtcacacctccttggcctcctagttatcgcctgttctccttcacctcactctcttgtttcccataccttcccaaagcttttgtgttgttggaactctttactttgtattttggacgaatacctggatatatgatcaaacgttctctgccgtgctcccagtcaaaggccacgaatgcaagtccgggggtggatgacgaatgggtctctcctagatcaactctgatggcaactggtgccttggcgatacacacttctaagggggcttttattttgcatccttagacttattcgctggattcacaggaatgagttctcaaaatagctttgccaatgcttccccaagcttcaacatgctcagcgcaagcacaacttcaacctcgacggttcgatcgcgccctcgccgcttagtttcattcacggacgacgaagacgacagcaacaatgctacaaactacgcctacgaggatgatgcccagctatttccctcgggattatcaacgactcttgcgccctccgagggtggaacgactcgatcccgcggagggaccccctcgccattgtcatcccgtggagcctcaccacttccaatgagacacccatcacgtgcgaccgaaacgataaatcgtagtagtcgcagtgggccaacatcgttcgcttggagtgggtcatcaaaggcctcgtcgtcgggaggtgctgcgaactttctggactcctcgtggtcctctctccaaagcctcgcatcttcagtattggggagtgatgctgaacaagttactccgaataatgcgacaaaaccacacgcgcgaaggaagccatctcggtctgacgtatatattaagagtgcttccaggtcgacgtggggtccgtcggcaccgacggctccgcagttcggaactgggacaaaggaagagcgacaggctttagttcaggccaaaaagagagaagcgctgctccttgctgatagtgatccgatcgcaagtcgtacgctccctcacaaaagacgcgactctggggacatttcatatcaagcgtttgagccggagcacgatgaagacgctctagcctatatccacaaagtgcaaccaacggacactatcaccggcgtgacgatcaaatacggctgccaggctgcagtgtttcggaaggcgaacggtttctggcccaacgacaacattcagagcagaaatactgttctcctaccagtcgatgcgtgctctctgaaaggccggcctgttcccccaaagcctgtagatcttttgaatgacgaagaccccagggacagctcgataaccccgacggctgcctctgccgatgatacctctgcaaccgcgtcaggggccgatggaaatcatgtttggaagcatgaatcgtgggtgcacatggatgggtttcccggaccagtcgaaattggccgcgttcctcgaagagcattgggattctttccgcgtacgcgtcgaaaatctatatcttactcggatgcagaacctcccgatttttaccgagaaacaatcactcctccgtctcctaccggatcaccacctctaccttcatcatttggtatactgccacgaagtcgaccaaacggcgaccaaccccaacccaaaaccacacaccccattcgtcctcagcatcgccgccaacgcagtagtatccaactgtctggcacaggggtgggaacacttgaccccacctcgactggtccagggcctgcgttagatgggttcactcgattcttcgcgcagcatataccgaatctcgcgcctccacaattcccggacaattttcggacgtcttcctttgactccacatccaccgtcgcatccaatgcatcgactagtctcgagaacattggcggggcttttgaaggatgggttcgaaaggtagcaacacgcgctaaggccggcattaatgagcttcagcaaggagcaaccacccagcagggtagcagcaggggtcgcaatatgtggcggatggatgacctgattgagcttgacgacggcttagtggatggtcggaactcccccagcccgttcaaaagtgcatcgcggaggtctgagttacagggcacctcatcctcatcctcgtctaatcaatataacagcccttcggtggcagcgagcaggtctcgtgcgactggatttggctctggctccggttcgtccgcctatggcgagcgggtcaaggatgattaacgtgtttgaatttcacagcgtacataataagagtctccctgtgtatccttcggagttcaagatttttgcatttcttttccttcatgcgcacccccaagcggcttggtgcttttgttcccactttggcgttgccatttttcaatgccacgtcacaccaatatttgacatcgaaacatcgcatgcatgagaagtgtggacatgaagaatctcagccgctatttcgtcacttgcatacagcccattgacccagttgatattcgcccaatgtctcaaccaggttgttgcgtgacggattttgggtgttgatttggactggacagaagcatgctccttgtcatttcttctggcatgttggatgtatagtaccttcaacgctcttgttgctactgcagcgcttttttctttatcacacctggcttccagcctaatgcctcatcatctagaacaccatcttcgaaatagactactcgctttgtatttgggcttatttttctcttcttttgccgtagcattaggggaacttctgtaaaagcacagctaaattccgaactggaaaagatcagtcgctttccccccttatgcccggtatttcctcttaattttcccacctatgagcacgcatggcaaagatcacagctcattccgacacgttgatggtggaatttctttagttgtgatacgatttccgggaaagagattgtctaattctccatggcctggatttgagaatctactttgcagccaagttggcactgaacaagctctataaaaaaccccttcaactcttgtccggtcagtttgagctcctctcgaacttcgaaaatgcggtcgatgacaagagcctcgacggtcctttcgaccttattcctctctataatttccggaacaatagccaactctctctcatccaaaacaacgggtaacacagcgaataccccaacagcaaccctatcaataagcaatcaaagcctaaagaccatcttcgtgggccgctctcttccggaattcaaccaagatctttttctgggcatcaagtatgccgacgagccaatacgcttcacaccagtcgagctcaagagcgactatgcatcgaaggataatgactctggacattataatctatcaccagaagaagtcgtcagcgctacttctaacctggtatactacaatgctatggagtacggctacgactgtcccgcgtatggatccgataccaccgacatggtcaacagtggtcttatcactttgaacgaggactgctttaacttaaatattatccgacctaatgccgacgagagtaacggattgcttccagttgtgatctggattttcggtggtgggtgggcacagggcgctactgcggatccgaggtatgttggtcgaggaatatagggctgggtacgaatgttcataccttagaaaggtggccgatggctgtggttaaccttatgctacgctgcctatagatataatatgagctatatcgttgaacagagcgcattgaacggcaagccagttctgggtgtttctatcaactaccgtctggcagcattcggattccttgactcggaggaagtaagggtagtgccaatatatagaaacttggatactgaggattcttgagattaacttggactccaggtcgaaggaaacaccaatctagcactgcgtgaccagcgcacggcgatgcgctgggtgaagaagaatatcaaagcgttcggcggtgatccgagcaagatcactatttggggcgagtctgcgtgagtcactggaaatattttggtataacagatgcttaattttgaataaacagtggtgcatatagtgttggagctcatctggtgaccaacaatggcgataacgagggtctttttagagctggtatagtccactgtacttcgtgccattttacgacaccagactaaggttcgcctagcaatcatggattctggaaatgctgtcgggcccccatacaacggaacagaatggcaccagccaatgtacgaccgaatcgtcgagagagccgggtgagtctatatcaaacaagtctctatcaaatgacgctgaatatactatatctagatgcaccaattcattgaataccctacaatgtctccgtgagctgccatacgcagctttatacagcattgcaaacgagggtctagaatggtttgctactgtcgacggctcattcataacccagtatccgcaaatcaactacagagaaggcacattagctcaagtgcctatcttgttagggacaaataccgatgaaggtaccagttttgggacgactggcacaaacaccgttgaggactgcatcaatgaattgactagtacgtgttgtgtatagcatttttaagtcacatcgtgctaagcgagtagcacagcatccaagcgttggatcctcaaccgtccccaagctacccagctgctgtcctactaccccaacgtccccgccattggctgcccctatggctggggaaataccacctggccctcgctgggactcatgtacaagcgctatgcatccatagccggggatgtgaccatggtagcgccacggcgcatgttagcccatcgaatggccagcttgcacgaggatgtatattcgtacagatgggatgtggcagcgttaaatggctcaacaacgattggggtgcaacatttcgcagaggtatgtagtaacccacctagtcttagatacaacctacctagctctctggtctgcaagatagactgacgcttgtatcggttatacagatccctttcgtctttgcaaatccagtgcaggccatcacaccgctagggtccgaccctgagcgcttgaaactggcccaaatggcagcgcggatgtggacatcattcgtggcagacttagatcccaatggacatggtggttagtagaacacacgtgcggctagaatctattgtttggcatctgacttcttctttctagtgccggatattgccaaatggcccaagtattcgtcccgagcgacgaactttgttttccgcttaccccgaaatgagtgttatgtcgaggctgacatataccgcgtcgatgggattgattatatcaacagcatcgcgcggtaatgtgggggtgaaggcaagctaggctagatcatctacgttgtgtgcatgaacaagggaaacagatggcagacatgtgttagtccaattgactttcttcgtcaggtaacgagtcaaatcaattgacagcaaagagaccaggcgttgattttgttatccaagtagcctgccgaccctatgagacgagcaggaatgatcaatgtggttctttttctcgtttggtaattgcacatcttatatctagccgaaaattcggaaacatcggttgatttaaacactcttagtgccgaccttgaggagctcgacctcgctgtgagcagttagtttcagttgtctcttataccttcgcagcaggactgagaaaagagatgagttactcacaagacaagcttagagttggcggggatcaggccggggaagccactaagatgattgaatatcagcacaactctcatagagagaaccaaaggtgcatgttggagttgtgagggattggaagcatccgcaaaaatgatggattgttgattcagcattgaggttggttggttggtacgtaccggtcgccatagccgaagtcactgtcgagaatcgaatattagcagtgttcagtagatccgcgcaaaagtgcaaaggaaagagaaatggcaactcacgggctgatggtcaggatggccttctcgccgagggacatctggggaacaccctcgtcccagcctaattattaggttagcaagctgaagaaatctatatttctgacacgagactcagtcggggtatattgaaacgcaccgcggatgagacggccgacaccgatgggggtggcaaggggcccacggccgggcttgtgggaggtatcgaagctgagggtatattagcgcgtgaggcacctggaggtggtatggagatttggcttacaggctgcccatgaagtggttatcggccttctcggggtcatacaagcagccggtgtagtggatggcaacgtgctcgcccttcttagggtagtcaacaccgttgccctcgaccagagtcttcttttcgacgcccattgtgaatgtaatagagatatatgtaggatgaatatgggagttgtgaagagaagaaacaaaacaggaagacggggaaagctcgggaggggcagattatccacttttttcctgggcgggggacgtacggagtggaactccaagtgtctttaagacgaacaacatggttgctttactgcttaatttattggctagcattcagatcatagactgggtatccatatatttactcaatggcaacttctggtgattttcagcaatagaataccccgaaaactcttttggaactgggatgtattcctgacacggttgcttggaaacagctggaatcagctgggaatagctgggaatagctcgaatgtaacaccagggcgaaaactacaacacatagggatatgatctgcgcaagacgggcaaattcgtgggttttgcgagtgccaccgatgaaatctccctcaatgtcatgatctacgacaggttcagaccagcccttctcttggactagagaaaggatcatcctatttgttccctcgatgccccgcggaggggtaatggcggggggaacatctccgcgataaccccggggctgnnnnnnnnnnnnnnnnnnnnnnnnnnnnnnnnnnnnnnnnnnnnnnnnnnnnnnnnnnnnnnnnnnnnnnnnnnnnnnnnnnnnnnnnnnnnnnnnnnnnnnnnnnnnnnnnnnnnnnnnnnnnnnnnnnnnnnnnnnnnnnnnnnnnnnnnnnnnnnnnnnnnnnnnnnnnncggcgataaccccggagctgttctataggtatgagagtagaaatatcaaggcaagatcccattaatatacagcatagattgtaacatcatgaccaaaatgccatcttcttcacgtcctccactgaaatttccacaattcgcgtcttagggaaccgaggatcgggcacaggagatgtcactgatgcttccaactgtagataatgcagtgttgagatcccagtgcgatccacaaaatcaagcacggggcggaagttcaaagcaacctggtcgacgccgtggctgtcatcggataaacagaagcgacccttacgcgccaaaaattcctaaaatgatcaaattagtcaaagatatacaacaaagaactgcgttggttaccttgcagatctccgctttgggatacggttctgtcattcccttgcgcaacgcagctgaattgagctccagcataccgccgtacgaggcaataaagtccaagtttcgtaaaattttactccagacactaggccaggtagtaaagctgcgctccatatcatcgctcttcagacgaatcaagtcaaaatggcccacaacaagcggtttgagttgctccagcatatccagctgtgcatcgaagtagtcctcgaatagtcgctcatccgttccgccggctttctctcgagcctgctcgtacataggtcggtcatagtcgatcggtacggtatgcatgtggtgaaccgagccaatgaagaattcaaagggaaatcgtgaaagtgagcgttcgatcaaatctttagaggcgggtcggatccagtcaatctcgaagccgatgatgattttgatctgggaggcgtatttctcgcggagagagactgcttccttccagtaagcggcctcatttgctgcatggctttcttctgtttctccagattcgaactggatgattggttaattcaagttttgcagtgtatgtgttccttacgcacttcctcgggataaaaatcttctttgtgacggggcatatgttcagtcagacaaaagacttgcatcttcttgctgatggcagtttgaatcacatcttccaaggagttttgggcatgaccagggcagaattggcccgaatggctgtgatgcgagaacggcatgttttatggatatgtcactgtttgtggttagcacaatattcgaagtaaataccgagttggagggcaggaataggcttagctgaattgaactgtgaacaaattctatactcacatctgccttttaggacgttcgaagaagatcaaatatgccggttacgtgggggagtcagacatctattgatagacgataaggatttcgccgcacgggtgttttatagcgcggagtaagaagtaacaattgtatgaatgcattattgattcatagatcgatactggataattcagtatacaatttcttgatcggtccttggatctaagcttttcacatttgatttctttaatataccccaatgagatgttacttccagccaccatctacccagacatcgctgaccacaagggtgcgaaacacgatcgtaccggacgccaatgatgaggtcaccgagtgaagcgcactgtcgttcaactgtcgttcaagttgtggacatgcttgaccggtacgactcaattgcaagcattgagccagaccaatcgaacccaatagcaaatcaggtcaaagccttgacttcctctaaacccgctctctagaacagtgtccccagtagctccccagtagttgcacactcgaaccatgatatcatgggtaccaggcaatgactgcttgccgtcctattcacagccttaagagaccgagtgaaccagccacaagagttgcgatgggattcaaccctaaagcagagtctaataaaccgaacaattcatccagcagccaaaacagtagcaacgacgtactccccatcatgcgagatcgataacttcgcaaccctcccctcacccgtatccccatccagcgcattcccaagataaacaatctcaggtctccgacttacatcctcgccaaacctccctccatcctcctgaacccggaccatgacatccttccagccaatcgaagccgcaccggacggcgccgcttttcgcgccgcctcttttgccgcgaagcgtcccgccagccagcgtgttatgtccgccggcacaggtgtaggctgttgatggtatgcggcgcgtgctttgaggacttcgctgaagcgcgtgtgaaagtcgtgctgttcttggtcgcagagaatgcggcgcgtgaatcgtgggagatagttgggtcgggtgaggaggcgggttattcgtgggatgtggacgatgtctgtgccgatgttcaggggaaatgggaagggaaggggtttcattttggggtttctggttgttggtgggcgttcttgggggagttgttgtgggagtgaagtggtaggtaggaaggttgcgggaggtgttggacacctcggaatagccgttgagcttttttttttttagttgattggagtacttgtgcttaactcattaggaaattattgatcgtgtatgaatttcgcgtgtgaccattagcgtggtttcagagcatgcttgttctatgctgtttacctctacatgttctcgtttcgctttacagtccctcattgctaaagcactcccattgaccggataagcaagctaatcggagccataaagagcaatcaatactcatgccaaggtgaaagtccacagagggctcttgccaagcaccgactccgagcgacccggtgtgagattgcgtcaaagcaatcgtaccactcatctttcttcttccgcgattgatcttgctcactggcaggggaagaacaggtctgaaaagccagtgtcaagaggatatttttctatgcagcgtacacgcctcctatgtacagatcaatcaacctcatccgccgacatcccaagatcggtccgtgtagctcctcgaaaaaaccgtggtcacaaaaaaaagctccggaagggcggataaacatcggtgcgcgctagaactggcacaacttcggaggcagtttgattgaatacaaatcatagctcctcatgttcgaccgctccatcaatataagccgtatcgaggattagtttaatggccagcggcgggcttcttctcgccgccatcaatctccttcatgaagttcctgtgagatatgaagttagcaagacgctcggggctgatataagatccaattcatggtcggtagttctctgttctcggcgacggtgttggacatactggacgaagttctcctcatccttggaggaggcgttgatggggggaccctgagcggtcttgggcttttcaccaccggacacggcaagccaggaaccggcgaagatgctgccgagggtggccatggcgagctaatgagggggtggaggaaacccggtcaacttccatgtttcacaaggatccgcacgaagcgcgatggaaaagggatggcgagcacgcagcggcgttttgggagatagagaaacttacgacgtgggagccgaccttcttgccagcgatctggtagtagacaaccattttgtagggttggaattgaggtacagcgagaggttcaattggcagcgatgtggacggaatcctcaggcttgcaccaaacgacgaggtcggcacggataccgcctttcctaatatggttagacagttcacatgacttcggaacagtggatgattaggtaaggacactcggccacccggccgcatccgatatcatgtgaccttcccgaagcgaaacatcaacagtgcattggcacatgaagatcaatcacaacacgagaacaccaaaaaggctggtttgaactcgatgaaaggaagaaaccgataagctaaagctcggactcaaaacgtttgacgacgaagaacaaataatgagttcggcgccgacatcatcccgaggtcccgtattccaaggttacttctacatatcccgatccggaggataccaacggtacctcggaaggaaactaccacagctgatgctatatgtcggctatggctggctgtcttcggctgtagtatgcggttaatatgagaatctttcaataataactcgtttcatcccttgcacagctttccctcattcttctcctttattgtctacatattatatacccccttcacgtattggcacgcgaataagcgttgcttgactacataaaccatcaccgatcatctatactacatccacaatggtctggggcggtcgtcaaccagatggatcccagtctcccccgcaggagttgttggataagcctatagtccgagagaagctcccccccaaattgcagcagttggttgatcgggaagacgacttctatgatgacctctactccccatagtatgtgaagctctgatgattttgtgtttttttcttttttcttttcttttttggtccaagcaagttacagttgctgtcgctgtcgctgtcgctgtcgtgtgttcggagatatggaagggagatagagcctgaaaaataaggccggtgtacttccttaccaccccgcaaactcatctctagcaaatcagcgcaacgccgaaagcaagcaaagacaaaacagaaactaacgatgggcacctcggttgacgacagctcggtcgattccacagacacggggtatcgctatgccgcgtacgccaaccgcatccgcacgatcctcctgtccgcccatcggtatgtcgcctacacttcagacatcggcgagtccttccgtccaattgcacacccatggctcgtgcgctctgcctacactatctcctggacatacctgctaggcgatgttggccacgagggctacaaggcctatctccggaactggagggcactggctcccaccggtgaggcatacaaagatgctagccagccttcgaataatcagattatcaagggcatggcgacgggcaacatgacgattggaaaatcagccgtgtctaaggatgagctttcaaactggtcgacccccgagatcccgcttgcggaggactaccgcatggtcatggtcaagcgcgcggtatttcagagtatcgcgagtatgggattgcccgcattcacaatccacagtgtggtccgctactctgggcagatggtgaagggtgttaagaatgcatttattcgtacctggacgccgatcggggtatgtaccccgggcgaacaggcaaatcagtgaatatgatgctaacgactgtctcttatagcttggtctcgctgttgtccccttccttccctatatcttcgatcatcccgtcgacgaggccgttgaatgggccttccgtactggtcttcgtgcttacggtggcgaagcagccgtccgcccactaccaggcaagagccttcctccccgggaagaggaggaacaccgcgctgttgcggcagcaaatatctcctgggacgagtacaagactgagcgggaccgcgcgcgtgagctgcgtcgccagtcaagtgagcaggccgtcagtggtggaatttcgtcgctgacgagctggttcggaaaatccgaatcggagtcggataagaagaagaaggaatgaggtaaatacactacattgttttcatcatttgaccgaagtgcttcctttggctgcttctgtctcttgtgtatgagcgcatctctctacttattgtacacatcatttcccacactctctcatcttctatattactgatatccactggggttagttgtacacttacactcaacctttctgaacaaattgtgattctgtgattcttcattttctgtacatattccttactcatctatctcgaaggtaatgaatgccgaccattttccaattttcatggttttagatcctcaatatcgaatacctgggactcaaattctgcgtgggacagtgttcaatgaacctggtcgggtcatggcagagatcatgctgataattcatatgtgacggtaaacccagctacaaacatcaattgaccataccgaacttgatagcgtccattggcctcgatttgagagtcggaatcgaaccgcgaagatcggaactcatcaataactgtccgggggtgtctagaggtctaaatacccgtggaacgttggtcctacctagacagagtcgggttagtgcctagagaacccatggttccgaatggagaacctggggtagacccacctttttagcttggaaggcacaactttctttttgcttttttgctcttttaattttatatcgttattatcgtcgtagcaacgcccgccactggattctgtgttctttctaccagtagcatatatttctataaagccagcaagtgaaatatgagcattcacacatcatttgccacctcaaagccctccacgcgaaccgacttggtctgatactgtacaatcaaacgagccagcttcaagcgatcttctctaccaagcctctgaaccctctgacaggggttctttacaatcaatccatcgtagtcgtgctggaattccacatcagcctcccattcatatagcgggctccgctctctaaagtaataaggccggtcatgcttcataacgacctcgtacagtttgcgaaattcttgagatcttccggtcttgatatctccatttggcagtaccaccacacttgcatgccacggcatatcaccaaataggtcgccttgccgcaataggggaatagagatcttgtttcgtcccaatgaagggtgaatcgagagacggatgtattttccaagtgtggcgttaatgacggcttcatatgcctgaaaaatcagtgagccagggaagtcagactttaagaacaactaaaacacaaagtatcccaagcaaaactccaagtgaaacttacgatgagtcggttgatcatggttttcgccatcttagacacctcagccgcgtagagtgccggatcggccgcgataagaggatcaaaccctttggcccattttaaatcctctgatatgcgactgaaatagctgttgtatgtggtcttggtatctgaatttgccttcaactcatggtcaatgtcgaatctcggatcgaagtatgtcggtgacatcagtttctccctgcaggtggggacgagacgcaggtaatctgccttggtaactctctcgccatctcctaaccccagcaagttcatcagccggatgaactgtatagaagaaaaatgcttctctttggcgattttgcgcagctcaatgccatagtcgtaatattcgtcgtcgggaacgccgaccaaatctacaccgtcagtttattttatcactgctggattgatataacaaatggcataccattatatactggtccgtcacaaatgaggataagtcgtgcgccgtaagggtagacctttgaaatctcctcgcacaagtgattcaacttcgctagacccatttcttctcctagatcagccccatctcctagtactttgtcttgatttgggctcttccatggaaatgcaggtaagaccatggttatcggctggtctgcggtgatgttcatcttcagcttgtcaggcacagagtcaaacacccttccgacgtctctctgatggccatcttcgctcgaatgcaagcaaaaccgctttagtacctcgacaacctttagaggcacttcatctggagcatattcgaatctcattgtaaatgaaatgccgaggaattgatggatgggtgcagcaaaatgggggggggggggggttttcgggtgttttnnnnnnnnnnnnnnnnnnnnnnnnnnnnnnnnnnnnnnnnnnnnnnnnnnnnnnnnnnnnnnnnnnnnnnnnnnnnnnnnnnnnnnnnnnnnnnnnnnnnnnnnnnnnnnnnnnnnnnnnnnnnnnnnnnnnnnnnnnnnnnnnnnnnnnnnnnnnnnnnnnngagggaggcggggggggggggggggttttcggatgttattgttatccctccgtgtcaagatcagcatctgattattgcagtgacatatagcttacagtattttatcagttacctgcacactatataggtattcttacatgtagtagtacccgtaatcggtaaaactagaacatagtatttgccaatttctgcagggagcaggtacatcgactgcacaatgtacgtagcacctaggagtcacattttagaattcacctctcctcctcccattttctttaatttatttttctctctaaagccttcctaaacaatatgggccagcgaaacataccacagagcagtgcggccggaatatgctcgacgaccgctggttcgtcctacacaacgtcggccactacctataacgaagagtccccgatatttgttcaacaagatcctcgccaacaagatgaataccgcaaagctgagaacaatgagatccccaatgggggtctcgtagcctggacccaggttctgactggacatctggttgtgttcaatgtatggggctacattacatcgtaagggagccccgtcacataagatattaattcaaaccattgacgcaatctaggtacggtttcttccaagaatactatgtcaaaactctcgatgtcagcccagcaaatgcatcttggatcggagcggtgcagatgttcttagtccatttcctggccactttctcaggccgagcgatggacgcaggctacctgagacaatgcatcacccttggatgtttcttccaggttgccggggcattggcgacctcattcggcacaaggttatggcatttttggttagcgcaaggcgttgtcagtggaattggccacggactcgtcttcagccccatgatctcgctgtatgcgacatacttcaactccaagcgagtgatggccgtctcgctggcatcttgcggggcagcgactggggggatggttttcccagtggtcgcgtataagtgtctcaacaatatcggcttcgcatggactgtccggattatggcagccattatcctattcaacagcattataattatcaagtttaccagagctcggattatacctcggagtcctcctccctgggttgatttcagtgcattccgtgaacgcccttacctccttttttcgatcggctcattcctgatcttcgagggtatttactttgcctacatttatgtaagttctgtcttgtttctcacattggttggcggcataatagctaacatacctaacaacatctacagctcagacaatatgcccaggcccatacaggtttcaccgcatctgactcacttctccttttaatcctgatgaacggcgttggtgttgcgtctcgaattgcatccgcatttgtggcagaccggtggctgggtgcggtaaggacttgcattgcagtctccatcccttgcggtatcgccattctagggtggattggtgtacacacccgcgttggcatgttcatctgggctacagtctatgggttactggttaattgtgcgcagagtcaattgcccgctgccaatgcatactttggatccaaagacccggaaaaatcaggcacacgtgttgggatgatcaccacgatcaatagcattccactactgactggaccgtacatagcagggcagctgatcgcgttacggggaggcgattacctgtacgcgcagttgttcggcggtatttgtatcttgactggagcgttgtttgtagtcggttctcacctttcgggagcttgaaattactatccatgcatgattgtatttgaacagagagttatgccgtgtatctacttgtctaagttactccgaggatgacgattatcaagctctgaatgaggtattatatctaagccacataacacagttttattgtttagcgtgttactaccctatctttacggtgctcgtataaacataaacataagcataaaagtgaaagtgaaagtgaatgcatgtccccctttgcaaattgcctcaactgaccttgaaacatccgagtcaacgaaaagtgtgacccgctctgtttcggaatgacctccctcccatcacgttttctccaacccctctcctcacgggccttctcctccaccaacggagcattacacaaaatggcactcaggcctcttcattaccaccttccattgttcccagggttccagctgctggacgtggcggccccactggacattctcaacattcgaacgcaataccctgacacatcagccatcaccctgactatatcagcggaaactctcgacccagtctcagtgaaaccaatcccacctcctaaggcaaaatggcgatttgacctgcccgtctcaaacatcaatacagcttgtaaccagcaaatgctaccacaatgtacatttgctgacgtgatatctgccctgaaagcggggaaagttgccgatgatggcagtggtgaattcaaacctatcgacgtgttgatcattccaggtggcccggggacacgtctggaccgtatttacgacactgatactacattcaacgaagctaaagtctccaacacgcaagaggttcgggactttctgacagctgttgcgccctatgtccgtcacagcatcataactgtttgcaccggcagtcatgtcctttcgcagactaggcttctagatggactccaggtaacaacaaattcagcccgctacgatgatatcgctaaacaaacgggcggcgtgaactggcagcgcaacaaacggtggctgcgtgatagtgtgtccaaggatgcggtgtctgatggcttgttgttgcctgggattgagatctggtcatctgccggaatcactgcggggattgatgtaatgctggagtttatttcagcgcattatggtggtatcgcagtcggagtagagactgcgaaacggatggagtatcgctgggagcgagagaaggaagcttcttacttcctgtaacgggttccccaaaaggttatcaaagttacagatgggctcaacctttcacgagccaggcttcagacgtaatactcgatgcgaatggcgaatgttccctggggatggaggtcttggcagaatatagtcagccgtgaagctagagcaattttaaacatacaacatgccatccctcaaaactccagtactttgtgtcactggtatacactataatttgtcagagagcagcgggtatttgatcggtcagtctatcttcgcgcgcccttctagagacatcctggacctttttggctttgtgatgtatttctctagccgtcaaaacaatgaaacattatatcgacatgttacatttaccccggaatcttttgccataccattgattggttctcctctatcccgatcccttgtgtaagatatacctaaatgtagcctgatgcctattcgggaaaccgcttgccagatcatgcatgagcagtcagctcaacaggtatcgacttctttggctgggagagcatcttcaaatagtcaaatagtaacggcacgtcctgtgatacggcgtatccacgggcagtatccaaatgcctaatctggatgtatggaaacagtcctacttcaaagtcatgtactagtttcagcatacaagtaatcagatggtaatcaataccactatatcctgtgcaatagcatggtttttattgaataacccaccgaagtaaagttatcagaagtacaagaataacgaggaagagggaagggggaggaaggaggcggcaaatggagttttaacggcgaataaacatggaggctatgagcataaggaaccaagagcaaagttgcaatagaaagccaccagattccaatacaagttaccagggtaccacccctataaatcacgagtacattcgaataccaaatctaccccttcccaatccctagctgccattgactttcccgctctcatctaccatgagctacatcaaaatgctagcgacaacggtagtcaaagtatctccccacttagacataattcctttcgactgtatcacccccgtcccaaagaaacgagcctcattcctccccaaaccacaaccagtcgcttcaaagccagaaaccaccaccgacactcatctcgacccaccggcagtatgttccaccttagcccgcctaaaggcagaggaaataatgaacatcgtggagcgctacggctcccatgagcgcacaaccacagccggagaatggctgggccggtcatcgtttacgccgcgtgtccagacacatgttgcagccaacagggcaattcctatggttctacctgcttttccgatgaagagcaataaccgcatggacaaggtgctaggttcacttccagatttgggggatgagcttgggttagcgcggttagtgaatctttgtcgggatatcaaggctgtttacccgcctggtgcagttgtggttatggttacggatgggatttgctataatggtgcggggttgaacccttctattgatttggatgtcagatacaggatcggacgctaatatgatttttggattctagatcttacggggatttctgatgaggaggtctgggaatatgggaatcgactgcggaagatcgccgttgagaagggatatgcttgcattcagttccatcgtattatgaatatgctgggtctttacactagcgcccatatttcaaaatcggattatgtgaagctctgtggtttatccagggctgaactccatcgacggtgtgggcggccgggttttgatgtcgataagtttttgaaaaatgatgaggattatctcaggacttataatggtaagtgtgtggctttcaagtcgagctaatatctcccagctgattcaatgcaggatatgacaagttcatgaaagtcgatctaaaattcagcccagtgactaaagattgcgccggtcctaaacaatataagaggaggatcaagattatcgcaaaagccatgattgtccgcggagtggtaagtcttctcgagagcgccatataaagcgacaaggtggctaatctctaggttgcaggaatacgcggagttagtacgtcaagtttaccccgactcactgcgtctctccattcatccctcatcggggcagacaaagctctcctgtccccttattccgcagaagaactcattttccatgagcccttggcactgtagtgtggcagtgacaaccacaggggaattcataacagctcaccaatccgtacatcggcagaagttcgaccttattagaaaagatggacaaccatatttcttccgtgagagctcgttgctttttaattgggacgccagagttgattttgagcatcattatgggcaaaaattggttgttaaggcacaaaaacagattgatcaagaactatctgactcggatttggacaaattggcacttttggcaattcaacaaagaagtgtgtcttttgtctttgtatatatctgatattttgaaggaaaattcatgttcaattgctcgtgaaggtccttgaatattgttatataatctaacgatgtaacagccatggtagatcgatatctatagccgacttttaaagggttattatcgttcttaactagttagttagcccagtgacagatagcactggtaccagtatgaaagctctcgttatagcgaattacccgaaagacctcaggccactgaagggcgcgctcaaccattgcacccttgcaactgcctgtgatttcgctcttgaaggctgtgagcctccgtatctcaaagaccaggtaatagcactatttcctggcaagcagcccagatgcaacgagctggctagctgctagaggcagggactggtcaccggcgtggtcgacaaagaagtagccgaccaagcactggcggagcctcaagaagacaacgtgcatcccctggtggagaggcttatggagcgtaatatgctagtatgtataatgagcccccagctgatacaatcaatgtatgccatggcgctgagtctatgtagtaatgagttgttggaaggactaagagtcctaaatcgaacatagcaagtctacactataatttacttcgataagacaggtttagaaaaaatgagatatactcgtcacattgacgggctcacgtccacatctacaaggccatacggcacctggcacatttcatacatctgtacagaaacgcagaaacgcacgaacaaaaagcttaagataaaacacagcgagacagggagtaatggaaggagagggaggtaaggagagatagggaataagcgtagggaaaaaaagccattagctgtcaaaaaggtaccacccagatccattattaatgtgcaagtccaaagactgaatgaccaatagttcataagagagagctttcaagtggaagccaaaagtagtgaaaagatttcgtcccaaatttggttgtcccagtgccattgaaagggataaaaaaatatttggtaaacaaaagggggaatatgtcaggaaagaaaaaaatggataacgcgacacatgcagcgacgaccgatcgtcgctcggagtatcatgttgagaagaaaagtggccggtcaaaaattgcacagaaagaagagatacgtgatatgtgacatgtaaatccttggcggatgatagacaatgaaaatgaagatttgtgcagtctctctgtccaaacctctcttggagagtgggggagagcatgagcgcattgaaaggagcagttatctcagaagaaataagggtcctcgagggcccagtgccctctgattgtcatcgtgggtccaaaaggaggtgggatatgatggaaggagcggtttatacgtcgtattgtcaaaagcatatctagttccatcccaaagaattctctgccataacgggagcactgatcatctgtgaacgagcagtgccacggctaccttggctgggggcgcgaccaccggaagcaaacatcgaaccagcggcggagcctccctggctcatctgctcagcggtagagctggagcgctggtgcagctgctttctcttgcggtagcggcgggcaacccagaacatacccgcaccgtaagcggcagcaccggccacaacaccaactccgattcccacggagctagccttagccttggagcttccggcagagccatcggtattgtcgctagtgccactgtccgtgccgtcatcgctgccgccattcttgatactgccagtcgagtcgctttcgccactggggtagtttccagagaactcgaggggaattgtggggtcaaccattgacatcaatgactggatggattcactagcttgggtgtagagagcagaattggggttaactttaagcgctttcagggcatcgaccttatcccgagggaaatagaagatagcaatggtggcgttatatcccgtggactgccagttatagtaaggctcaatagcaaacataacagggctgtcctgagcagagaggtttggcaaagcgttctctatagcctggggggtatagttgaagatctgcgacgacgacaagggtgtagttgcaacaaatgaccagggcagctgactgttgaaaccaagctggagcagaatagagtcagacggagcctcggtgacttcattcgacggggtgatagagccagggagcgatggtggtgccgtgggcttcgcagtctcgccggaggtcgagctctccgtggcggtgacggtaggcacaataagaatagtcgatggcatccagtcattgtcgttggaggtggaggtggaagtggaagtggaggtagagagcgtaggcatctctgtcgtctgagactccacggtggtcttagccgtgctcgcttcttcgctcgtcgtcgaagacgacacgggaagaggaatgtaggctgagtgagaggtgggggtgggggtggaaaccttggagctctcgtaagaggcactacccggaacagaggcggcggtggtagtagtacctaagaaaggagcccagatactagaaccagagacagttgcggattcagaagtagaggtagaatcagatccgggcgactgtgggacaggaaccgatcccagggtcttggtcggggtggggatggcaccagtgttggtacctccctggccaggaatgagagcagtcgacttggacggcagaagactaccatttggaatagacgcagtcggaatcaaagcagtgctaccagtgccagtagaggtgacaccaaggacggaatccacgcttgacacgagactgccgacgagatcaccaggagttgtagttccagtgggggtgggggtggctaacggtgagctagtagcaaacgcaggcacgctgactggaatggtaggcgaactatacgggtcggaggacacagtagcacttgtgctgttaccggtggaagacttgtcacccaaacccaaaagggcagaaagatccgaccccgagcttgccatgcttgaggctgcactgctgatcttgttggcgctagaagatccagtgggtgtcgcagacacggaggttgttgattcgccgagaatgccgcccaatcccgaggttaggtcaccaaggacactgtcgctggaggatgcaaaaggagtagaagaagcagacgaagttaccttagctgataagtcggagacgggggtagtcaaggatgtggaaccacctccgacgaggttgcccacattcgaggtcaaatcacttaggagaccgccgctagatgtagcagtagcagaagaaataggcgaagtgaccacagctgatgagccggaggcgggggccgcagtcgaggagatagaatcaactccgaggatactgcccacattcgaggtcaaattactcaggagaccgtcgctagatgatgtggtagcagcagcagcagcagtagaagtaggcgaagttaccacagccgatgagccggaggtggggatcgcagtcgaggatacagcactactgcctaggaggttacccacattcgaggtcaaatcactcaagagactgtcgctagatgatgtggtagcagcagcagcagtagaagtagccgaagttaccacagccgatgagccggaggcgggaatcgaagtcgaggatatgaccgcactcgaggatgtggaagtactaccgagaaggttacccacatccgaggtcaaatcactgaggataccaccgctagaggatgcagtagcagtagtagaagcagacgaaggtaccacagcagatgagtcggagaccggggtcgtagtcgaggatatgaccgcactcgaggatgtggaagtactaccgagaaggttacccacatccgaggtcaaatcactaaggataccaccgctagatgatgtagcagcagcagcggcagcagtagaagtaaccgaaggaactacagccggtgagtcggagaccggggtcgtagtcgaggatgtagtcgaggacgtagtggcagcagcagcagcagaagtaggcgaagataccagagccgatgagaccggggtcgtagtcggggagatagaatcaaccccgagtatactgcccacattcgaggtcaagtcaccaaggataccatcgctagaggtcgtggccgaaggagacgtagtagcggcctcggctgatgagtcgaccaccgatccctgctggctcgtggctcccgcatcggtagatgcggcctcggagttctgcgtactcgtgttctcggtgctcgaaccctctgtctgctgcgtagtcgtggtagtggtgctagtcggttcacctccaatagtcgtagtaccagtgatacgatgggtgatctcggggttcttggggtcgatcgagatggtcacaataaccacttcctgtccctgctggggctgaacggcagccgaggattcgggggtggtttcgggggtgggcgtagccgtggatgaagaaacttgggtaggaatcacgttgtcgaagacggcatcgaagattgagccaggttcgggctcagcgtttctgcgaatagttcgcttgacttcctgcgggaagtaccaacggggtcgctgaacgtgggcttcgggggcatcttgagctgcgacgagctcaagaccgcctacagcgaggaaggctgcgagaacggagatggcgtcgggacgcatgttggacaattctgtacgtgatcgctcagagcgggtccaaggtcagtgtacaaaaatgcgataaccaccgtctgtcaacacctcatgaatgatcagggagtgtgaccaggaggtagagtgcctggagtattcgagtttccaacacaaccaagccccgggcaattgcgataaattcacaatgtcaagattattcagagtatacaacgtctcgatggcaaccgatgagaccgaattggcgcaaacaataactcgacgataaacgaatggaaagggggatttcgatcaatctgaaacgacccccagaaggcgaaaaaaacgagtgtgggcttagaaaagctgtaaggagtgaacgacgactttctgtagaaccgtccgggcaacgaggtcaaagaaagtgaaaacagaaaatgcgggtgaccgatgcaaggggagagtagcccaggtcaacgcgaacacagcaaaagcagacaagggagagaaataaaggagtgaatgagtgaatgaagttgatcagagaagaagaggatcacttcatcattaggggggggaaaggtggaatgggggggcgggacacgttgtggtagcgtcaacaagggtaatttacggtaaattacaacttttagtgtatttaacgagctggtccgggcgtttggcaggtgcgtgggatgtggccacgcacttgcccctgagtgtagttcttagatattgaacttgatcctattccaacaatgtagtaagtacgttgtatgtttaatagataagctggtctgattatggacatctattgttgtaacaacatatttatacctatttataacccatttggaacctctgaagtcaaacatattccaagaccctcatatgaaaccatactaaacactaacctgccgatatcagccatttaggtacggagtcgtctagtcagtatttcgtaaataacggcaatgatggcccacgccatgcagaaaaccgaaatgaataatgaatgctcatgggggaagaatgagtctgttccctataggtccacgaccgctttgctttgtatatagtacaagtatatctgagccctcttcggcatttacagtatagagactgatgtacaggtactccgtactcggacgatatttcccttttcttctcttttgccgttacgccgttcacccgtgcaacaataatatataccattggaatataatccggctattgcgaatatcgatcgacaatcaaaaagcatgataagatggtaaatcaacagatatgactcgagcgtacccaactcaacccatacaagattgcacatataccttatgtctgtcagatatgaagtatagagtagacacataaaatccgaagaatgagactattttcgcgcaatgtaatacaatgatgacagcacttaatttcgaatcaaacccccccgaaaaaaaaacataaagtccgtgttaggatctgaaagcgtttttcatttgaggcgatcaatagccccggagaccattgacgaaaaaaatgccgaattgagtcggggctaaacccacctaagccgcggatcacaatataaaagaaggaaaaagtgagaaaaaggcgccaaggccaaagacaattccgagcaaagttcagtccgtcgcaggtctagccccggaggcgtcaactaagtgggcccttcccacacacgtacctgagcgtggagggaatccgctcaagtgcgtggccccaattacacgttaccaccattagttgtggctcaagctcgccagtcttacacacctacccccttctggcttaaacccatcaaagaaatctcgtgtagccgccgttaagaagtacggagtacggagtacatacggagtaagagagctgtccgatgaacgagccacaagttggtccttccatttccaagtctcgtgagacatatataattgtcgtacttggctagcttgcgagttatacaactatgctgtgcaacaccactagtactagttcaatccactatggaagtaggggatgagccctgactcaaaattgggttattagaacgagggtatattaagaaatgtttcacactatatcgatggttaaggttttatctctagaaccatagactaataaagattagctgatacaaacacctgcccatacctatattgtagtgtacaacatattctccatatctgaagctgattgaactgtcaagtttcagaatgataaaatacaccacgtgcccccatcggaatggagggttggcagctgcgatttcccctcattcttgctgtcattttcaggtgctcagcattccttagtgcgtttgagattgtgctaactaatgccaagtggtataagatcaacgaagccaaggtctcgctagaatctgtttccctctcctattaccctaagctcttgcctctttagctttgttcaagggcttctggctgcatgcaccctcgagatcgagaagcctttaggaatgcaggaacaaaggaccgagcatacaagcatatgcgagagccatggatggtccacgggtttaattatagttaaactcagccacattctctttgttggacctaggacatactccaggactctctactccgtatcacgaagatgtgaacaatatcaagcgtccacggatgctcccggcatcattccaagggccttttatatgttgtgcaataaacttccaggggttcatcaactgtaccatggacgagtgcagacgctagtcctgttcctgagccctacagttccagtctccacccttcacccttggtttcagcctgtatgtattgaaaagtgttgaacgcaagttacaagtttccaatgccaagaataccgtaatatttccaaccagactgtaaaatatacgtagatcatgtgaccgactccctcgcacatttgattcttgtctccggtggagagtgtgacgagagttgagccatcaaaagactccaaaagtgccatgaaacagtccaggtggaggtgtcggccctatacattctccacatcatcgtcatcccctgcagtcccgctcaaagtctagaactgcgtccactgccaggctttgtgactaggccagaacactcgatttcgacatccgatccctggggaagggacttgacggcaacgcaagtacgcacctaaaagggccaggcccaatgacaatgagaaacggtccacttttccgggaaaagaatataagagaaagagagacgaattccagactggatcattttctgtagaattcgaatctcgttcttttcgagcacagaatacttaccggcttaggatccgagaagaaagtagcgtagacttcattcacagccgagaaatcagccatatccgtgaggaagatgttgaccttgactgcatcttggaggctcgaccctgcagcctctaggactgcattgaggttgcggaggatttgtcgcttttcacatgttagaaaatatatcacaaatcaggcttcgcgtctctcatactgttcggttctggatgcttccctccaccatttgacccgtggtcgggtctactcccaactgaccagagcagtagaccatgttgccgacgacgataccctgggataggattgggggtggggtgggtgcacccttggtactaacgggggtacgtgttggcttggacatttttgaaagatgtgagtgagaatgaattctgtcagaataggatcgagaggaatttgttgagagtagtccaaattatctggccccagggacgttatcgattagaaatccccacattgaccgacttcccgaggtcggagccctctggagccctcttgagcgcccttgtatgttgtaaagcacaactcccgataaggagattcttatagacggccttaaagccggtatatactgctatatatatagatggtgcctggccaggatcaccctctcatagtgctcttttagatgtctatatgtccttatcaagtatatgaggttaaggtgaagactttctgattaacgaggtggattaatggagtagaaccatgtaggtagcgagacaccgcataaacctatgatatagcttcacggtggcagatcatatgatctctgaatatagaaaggtacttagatggtgtcatggtgcgatcgtaagtcatataataggtattaagaatactatagggatatcgtacttaacttatacaagctaattgagaattgcagccaggtggatatacccgaagtagctagtggggagtgtgaagagtgtgtccgtagtatttctcggaatatgttgtataataatgcatcactttattattcttggcgagagcaggatcacccctcatagcaacgagacatttctatggtaccataccacctcaaataacaaggcgggagagatcgtcaaactcacgggaggagatatgattgcgccagaagcgcagaccctcaattccttcttctcgacagagaagcccccgatcttcagccatctccagctcttcggcagccaccccgacgctccatttgaaccgatgcgcggcttcttgtgcagtgacggcccgaccaaagagagaccaatcccacgggacaggatcgctaggcggaactcgccggagctcctccatccaggcctcgagtttttcaatggtcttctcgtcactccagtcatatcgctgtacaacaagaagaccgcttttgaatcttcgtagacgcactggtaacttgagcttctcccacagctccgctgctttctgaaactccgaaggactggtcaattccactccattacgggaccgattgaaaacagcccagagatcaattagactcataatcccaccttcccgctgcaaaatgccttttcggtcatcagtgagatactcggctaggtcgcgcgcaagttctgataaatatagactttcagacccagaactaagcatgtctttagttgtcaccatcccgagagccgcagcggactcagatagcaccacgctggtttctggagagccttcgttagtagccatgccagactcacgcgccagggtctcggccagcgcaacgatctgcttggcggaggccatcaaagcctccaggtcttcaaaggcgttccctatgacctgctcgtttttcctccgggcttccagccctcggcgttctaaccccgcgataccaaccccggagtgtcgtggtgccgagggtataggactttcaacgctagcggcaggagagggtaaagctggcgaggaggcggtttgcgacggcgaaggtactgggggcgcattttgcaaaagccattttctttgaaccaaggcccccttgagtctttcatggaatgtcttatcaccacctgcacgaaatgaaagtttaatgctctcactaatttccgtgttcgcgatgtgcgattgctcaaataatggcgcaggagagtccacacgattagcgttcgccgaagagccagcagatagaggcgctccacaaatctcgcattccacaagagacggatggttcacaaaggtacaccgcctacaagacacagttcccctgagctcagaaggcgatagagacgtgttggcatttggttggcctgtatctcgtgtagtggctggtgatgcaaccgaactcagcaatgtagactcccggcttgttgcagcactgatcgccgctttgagaacggtcgtaaacggtggtttaatgccacatgctagacaaggaggtaaatttgtagccgcactagccgttgcggggtcgaaattggacggaactgggttggagaatgagcatatgggacagatccaagtggcattgattggctttggagatggtgaactctgtgagaggttggtctgtgggaggtgagagagtgactgcgttgaatgaagagccgattgttgggctacagtcgggctagctgttgcgctcctcgactgatcggccttcttcttctgcggtttcgggtatatgatgagcttcggagatgacttcaggaaaccagccttgaatccatgggtttgttagtgattggccaaaaataaaagcctcgaaagcaagatgtatgcatgtcgcacctgagactccactctatcgatttcttttagatcaatagccactgagtactttcgcgggtcctcggccgcaacatagcacactctgtgagatgtgagataggcatggccattttgataattctggattttgtatttccttttgcctctaatcagcaccccgcatcagaagctcaccatgagctacttacccttcatacaaccccaccgcatcttggacaaagagaaggatctcatcaggtaatagcaatggtctgagcgcagtagtcagatccagcgacttgaagaacatctagtaggttcaaccagctcccagcatcaaggagatccataaagagtcatgtccaaggcgattacgataacccgataaggcgggatgcatccgtagtcggacaaactaaagtccggtgagtaagcgagtatccctcaccgtcacgagtctgtgtggacttcactctcaccctccccgggctcgtgaacatctcatctcgtcttggaaataaacgttcatcaactgttctcttctctcaaaacagtaccagctgaggagtaagatcaagacttgattcttccagcagttcctcgattcctgccccttcgtagctcttttcattcttacatcttgtttctttgttctctttcaaatcttgcatctacgatgagttccagcataccaccttggcgttctaccacaccaggcacaatgtctagtgcattccctccaagtggtaagaaaaatatttcaactcaagtctcgttgctctggtgtcaggagactaacaacctgacagcggctccagcatacactccagtccaagcgcgtcgtagcctcgcccatcataccaagccaacaaatggaaccgttcctaccaaacccactcagtcggcaccaccggatacagaagcccgggcgcgagtggagttccccccacccgtacgctcgtatgtgcaacgctgttttgctcccgaaaatcaggttgcaagcgtgagcattcctgaaatgcaggagaagctgaggcacgtcattacggaggcggcccagaatgacaagctgggattgatcgactgggaaaggctacctttgccccaaactatggtgcaaaatgaacgcaacaagatcctggccaaccccagctcttcaaactgggcgtccagccacccggcttctccgggagatgccacacggaagcgaaagtcaactgatggccaccaatcggaaactggatcgccgccatggagaaaagctaaccgcaatcgttttgaagatcgagttactcaccctaccacagagaaaaaaccacgcataacactggaccagtctagtaagtccaaagctaatttggagatgaggaagaagcgttttgagggaattggggctagcgggaattctccttcttctcctgcagaattgccgatgcgtcctgctgacgtggatcacggccccgttgtcgggcgatgccaaacattggagaagaactacttccgattgacatctgctccgaacccggacagtgttcgtcctttgccggttttgcaaaagaccctggatttattgaagagaaaatggaaggacaatggcaactacggttacatctgtgaccagttcaagtctttgcgtcaagacctaacggttcagcgcatccgaaatgaattcactgtcgtcgtctacgaaatccacgcccgcatcgccttggaaaaaggggatcttggtgagtacaaccagtgccagacccagctacgagtgctgtatgcgcagcatctgggaggacacccgacggaattcaaggcctatcgtattctctatttcatttacacacggaactggacggcgatgaacgacgcactagccgacgtaactgcagaagataagaaagacaaggccgtgaaacatgctctgaatgttcgctctgcccttgcactcgggaattaccatcgtttcttccagctataccttaataccccgaatatgggagcctacctcatggacatgtttgtcgatcgtgagcggttgagtgctcttgcaactatgtgtaaagcgtgagtctcttgatttcgcatgttctgtttgagaattctcgctgaccttttatcgtagatacaaaccagatgtcaacatccgatttatcacagaagagcttggatttgagtctgatgagcagactgcacgttttgttctagacaactcctccgaagaactgctggcggagagggacggcgctgtaaggctgttgacaggcaaagcaggcacgctgttcgatcaagccaaagaagcggcacaccgtatcgtcgatatcaaaggccagatctaaccaagttctcattttccatctctttcttgcggcgaggattaaaccattggatctcagtcaaagccattttctcattttcttgattttggcgtatcttcaaaagcgggaaggcgtttaccacatacgtgcacatggatacaacataacctttcgagagtcgattgcacattgacatagtaaatacctataatatccaatctatccagtacttattccatatgcacagttctgccttgtatgtcaacactcgccttcaattgcacatcacggtagtattaggaagtgagatatgatccacgtgaggcgagtgagcaactctggtcgagaccttttttgtgcgggaacctgccaagcacgtacttcgtagggtagatgtagatgtggccaatgatcgacattgaacagagtttcttcagcttgccagtgccttaatataattgttttaacttttcatccttgtatctaatattcgagagaaaagtacggagtacggagtatcctcacacggatacagtcggcagattgcaggagccgcgcattcgccccggaaatctaaaattttttaatattagggaattaagcccccaatctaggccctttgtttctgatacatttttcatatccattttctttgttcggtggggtatgcaggtaggtgctccgtacatatccagcctaaattaatttcctgaaaaatcattaaaatagaaagatcggaacggcttccaatgggagacaacaccaaaatccacggtagaggtaaactttgtaggtcaaccatggttacaggtggggaaatgaggggcaaagatccttctttttcttctttttcgttctgtgtacctaccctttctagtacatatttacctgtatgtataactctgtatctacctatataggtaagatggatatatgcatgtacaattaccatgtacaatgatatatgtatgtctcgtactagtcaaggtcccacgggtacctatgggagatgacaaatggggagactcggacagaatcgcatttagtctagtagggtgtgattcaattacactagccgccgatggtggattatcatttgtctgcccaacggcaataataataaataaatactagagctggcgaatatattctaatggttctaggtacgacacctgacgatgtatacaccgaggctcaacccaaggttcagggttggcgttatcctgtattgccatgaccatacgatattgcagataaagatcaaagcctacatgcatatggagtactctgtatagatcctgaaatacccagaataccctcaagaacatcagaagatcccaaagaaagcaaaaaagcaaaaagcgggcccccctggcaatcatccaagccgcgtggttggaaccgcaatacggattacgctggtcaaggtatatacacctgggcatttgactaggccttgctcctcctttcctcctctttgcatctctccttgaatcccttcgccctcttttaccatgaaggtgagtttccctcgttccgcagtatgacctggtatcgtgtttaattaatccggtttctaaaaaaaaatcaaattccaaggcctttagacgatctctgaagggggagaaagatcccaaaccccatcatatctctattacacccaagtccgctattgcgattctacccccgaaaaaagtgagttgcgtccttgcgcaagttcgccagttgcgttgaaattcgccgctttctttgacccctcgcccctccttgtcccacttccgactcgttcttggcagtggctgaccgcatttcccaggtaatcaaagcgctttacgactaccaaccggaggggatctcgcaggaattggcattcagcaagggagatttctttcacgttatcagcagggaggacgattcggattggtacgaagcgtgcaatccgctgatccctagtgctagggggcttgtgcccgtctccttttttgaggttatcggcaaaaacgagagggatagtgggggttccggcgacctgtccaaggaccaccacgactcaggattctccgaccgcggtcgttcccaagattcttccaccaccaagaacggcgcattcagaatgtctgcactcaagggtcaaggcgctatggtctacggagttgtccagtacgatttccaagcggagcgacccgatgaattggacgcgaaggctggcgaggccattatcgtcatcgcccaatctaacccggagtggtttgtcgcaaaacccatcggtcgtctcggcggcccaggtctgattcccgtttctttcatcgagttacgtgatatgcaaagcggacaggctgtggccgacccgcttgacgcggtgcgacgcgccggtgttcccaaggttgaggagtggaagaaaatgacggcggaatacaaaaacagcagtattacactgggcaaaattgaccctggtcacggtgggggcaatatgacggctgtcacctcgggcatggataagatgtccatgggccaccagagtcaaatgagtcaaaatgacaatgtttatgtatgcaaactttctggttcccgtttgcgattactaaccgatgatgagcaggagcaccaacgtaacgccagcaagggaactttgtcgcaagtgcccacatcgcaacagagccaacttctcgtccccgtctccgcctatattccgcgctactgtttcgataacgacaagtattggtacatcatcgaggcgaagatggaagacggtcgctgctgggagctgtcgcgttactaccacgatttctacgacttccagatcgccctactgacccaattcgaagatgaagctggcaaccgtggccgtgggcgaacgctccctttcatgccaggccctgttacccacgtgacggatgcgatttccaacggccgacgacagaacctggacgaatacatcaagaagctcctgtctatgcccccgcatatttcgcgctgtgaactcgtgcgcgaactcttctcgccccgagaaggagacttcgaaatcgatcccaatgcgttcggcgaggatgcccggttctcgggtggatctcagcactccgtcgtggatccccagcaaaccgtgtcgcgccagtcttcgcagcagcaaatcaatgcatccaccgagcgggtatcccagcagcgcgccccagcacccacgccctacgccaatggtggcccgccgcccatgaaccgccaacctagctctatcacccaagcttctagcgcatcggccaacagcgcgatgaaggtcaaggtgttcttccaggatgaccttattgcgatccgcatcccatcgggtgtgagcatgcagcacctcaaggacaagctatgtgaccggttgaagattcaggacgatatcgttgtgcagtaccgtgacgaatcctccggctcctatatcgatctctatactgatcaggacctggagaatgccatgcaacggaacatcaagctgaccctctttgtcagcgtcgcataaaaagcactcacttctttcctggtgttgcggtcaatagacttgcccatgatttcatcgatgaggttatttattgtcaacctcatattaatgtttgccacgagtaaggttggtgcattggagtttttgaatgacgcatggttattccttgatttgtttttttcttctttttcaaactgatcatcagttctttcagcgatttcacatagtccatgaggacgagatcgtgatttaacgaatctgatgcgagatgtatggcacggtttccttcctatctgcctattttctttttctttctatttcttgttcctgcgatgtggcattatgggctttcttctatttctgcgtcaatttcgcatcagatctacatctcatcctattcaggatcataccccggtctgcctgcttctgtgttgtgtacatatttttcttacttctcgtgcatataccggggaggcctttttcatatgggagaggctcaaccgtggtatctcacagctctttttgcaccagctataaatgttgatatacattatttgagaatattagaatcgttcgggtagagatgtcgccatgatagaatatcacgtgacttgctgacttgatctttgtcctgatttgttcttccaaggttcgattcttggaatgttattctggtcgtggtccgtcacaaattttcaccttgaatcccagagctgcaggagctgtatatatattttctgtgcatgttgtaattcggcatctttagcccgggcgtttggcttacgaggacccgccaccactccagagctatccggaggaaaaacaaatccttgcctacaatacaatacctcggttaacgccttcgcatcgcaaccgctctccgccagggaaacccgacctctagcccaccgtcgcacccgcaaatataacttccaaaaaacctgccaatgagccgcccatcggcaaagctatgcgcggaatgtttcccaaacgcgctgcgggcgcctcggggcctccgccctacaatgttgcggggcgtcgctcgtagattttatgccacacagcagagggctctcggtacattacggcggccgagtcgatctccgttggtatatgtctctccggagaggatccgctcccagccggccattcagtcaccaaagggccgaggtctggctacagtctcggacggcgagaagaacgccgctcctacgccacgggatgggcctatgagagaatatgatgtgcgtgtgcgggatgggagactgagagatgacgaatatcagagaggtaagttgtgatcaactctggcgcacatattcaagctgacatgcgccgatgctctagggatcatccaaaatctgcaggacctcttcgaggcactgaaagattaccaccagcctaaagttgttcacccagagcccgagtctctgcaccctgaggcaacgtcatctttcttcgggtctttgttcggcggtggcgtgaagaagcacgaaaagtccgctgtccccgataaccttccgaagggactgtacatgtatggcgacgtcgggtgcggtaagacgatgttgatggatctgttcttcgatacgctaccgccgaacatcaagagtaagacgcgcattcactttcacaacttcatgcaggatgtacataagcgcatgcacgtagtgaagatgaagtatggaaatgacttcgatgcactgccgatggttgcggccgatattgccgagctctcaggcgtgctttgctttgacgagttccagtgtacggatgtagccgatgctatgatactgcgacagtaagtgttcgattcccggatggggccattcaataacccagctgatgatttgccaaccaggcttcttgagcacctcatgtcccacggcgttgttctcgtcaccacatccaaccgccatccagacgacctgtacaaaaacggcattcagcgcgaatccttcatcccatgcattaacctcctcaagaccgatctgcacgtcatcaacctcaattccccaacagattaccgcaaaatccctcggcctccagctgccgtctattaccatccgctgggcgaggccgcacagcagcacgcgcagaagtggttcgagttcctgggtgaccctatcgatgacccgccgcatgcagactcgcaagttgtctggggccgcgaaatcaatgttccctgtgctagcggcaaggctgcgaaattcaccttccaggagcttatcggcgcggccacgggtgcagccgactacctcgagctcgtccggcattacaatgcattcattgtcacagacgttccaagaatgaaccatacccaacgtgatctggcgaggcgttttattacctttattgatgcggtatatgagagccgggtgagtaacgagcaacgttcctgttcacctttttaccgtgcagtcaactaacaacccccttcaacaggccaaattagttctcacgaccgaagtacccttagcagaccttttcatgtccgaacctgatacgaagaaaggctctaaaggtgacggtggcgaccactcagatctctccgatgcaatgcgcaacctaatggacgaccttggtatgtctgtgcaaacgctgaagagcacgtctattttcagtggtgacgaggagcggtttgcgtttgcgcgtgcgctttcccgtctttctgagatgggaagtaaggagtgggtggagcgcggatcggcgcttgaaaggactcctgcgcagaataaggaggatcgggaggcttggcaaaagacgaggagtcattggagtgaggataatatgtagattatattgttctcttgcctttgtcctcttgcctttggttcttgccttttgttttgttcacacgctacactgtgctgtagagatacctgtgcacatagatcgagtttggtgtaaatagcatagctcttctttcaattatgaattatccctatggattgaatttgttctgctcctcaaattgaacctacaacatatattcgggacataaatctccttatatcgactgtcagctcaattcctcatatattggaatttggagatgcgcggacatgttttccaccctgatatcaggtgacgtcacgtcgcatccgaggacaagtttgtatggtatttcaagatccctaataaattcgaggtccgaatccaggcataaattcacgtcatcggcctgcaatcagcatgactccaccataccagtgccaataccttgtattgcctatggaacccccaagatcgaccacccaggcaacacaggcaaaggttaccaaactatggctccacctccgtgggattgcaggaaactgccccgcgaatgaaatgggagcaattcgcaatgtttcttgtctattctgctccattacaggttttcctgtcggcattggttggtaaagtgcccgggcgttaggttagggtatgggtggtaggtcatactatggtcattcttgcaaagcggttattccatcctggttaaactttggcttgggcaatcgactttccgctttgtaattagacgacttcatttcgttggtagatggacttcaggatatgcaacggggaattacatcattgacgtcgcacctagggaattgcacgatgaccagcttgattttgatatataaagcggaaaattcagccttacctatgctactctttcctctctttctctggtattattgatatcaaccacacttattatggcagcaaagtcacactccaagactgcggacggcaaatttgccgatctacaaaaggacaccatcgaagtcaacgacaagcagcacatgacaactgacaacggcgtcaaaatctccaacccagaccaatggctccgcatcgtagacgaaaagaatcttgggccctcactcctggaagatcagatcgcccgcgaaaaggtatctataacttacattcatccacatatataccaatatatatctaagcaaactaaccaacaaacaatagatcacgcgcttcgaccacgaacgcattccagagagagtagtacatgcgcgcggaagcggcgccttcggcacgttcaagctattcgagagcgccgaggacgtaacaaccgcgggaatactgactgatacaaagcgggagacgccgctgttcgtgcgattctcgactgtgcagggtagcaggggcagtgcggatacagtgcgcgatgtgcgcgggttcgctgttaagatgtataccgcggagggaaactgggatatcgtcgggaataacattcctgttttctttattcaggactcgatcaagttccctgatgttattcattctgttaagcctgagccgcataatgaggtgccgcagggtcagagtgcgcacaataatttctgggatttccagtatctgcattcggaggctacgcatatgaaccagtgggttagtatttctccctatttggttgtgtgtcgatacctgatagctgatgcggttcgtgatagattatgtccgatagagctattccgcggtctctccgcatgatgcagggattcggcgtgaatacctattccttgattaacaaggccggcaagcgtcatttcgtcaagttccacttcactccagagctgggcgtgcactctctcgtctgggatgaggcgttgaagatcggcggccaggatcccgacttccaccggaaagacttaatggaggcgatcgaggcaggacacttcccacgctggaagttcggcctgcaactcatccccgaagaaaaggccgacagcttcgagttcgaccctctcgacgccacgaaggtctggcccgaagagctcgtgcctatccgctacatcggcgagatggaacttaaccgtaacatcgacgagttcttccctcagaccgagcaggtcgcattctgcacgagtcacattgtgccaggcatcgacttctccgacgatcctctgcttcaaggccgcaacttctcatacttcgacacgcagatttcgcggctcggaccgaattgggaggagctgcctatcaaccggccagtatgtccatacatgaacctggtcaaccgcgacggccagggcagacatcgcatcactaagagcaaggtgaactactggccgaaccggttctctgcgaatccacccgcgaccgcagagcagggcggcttcgtcagctacccggcaaaaccgcagggcgcaaagaagcgcgcgctgtcagagaagttcaaggagcacttcaaccagccgcaggtgttctacaactcgctctcaccaattgagaagatgcatgtggccaaggcattctcattcgagctagatcactgcgacgaccccgtcgtctacaagcgcatgtcagaacgtctaacagccatcgatctagacctagccaagaccgtcgcgaagaatgtcggtggcgacgcacccgtcaaagcctccaaggaaaacaggggtatcaaagccaagggtctgagccagcttgaattcatgccggagaaacccatcattgcgacgcgtcgcatcgccatcctgattgctgacggcttcgacttcaaccagtacaccacaatgaaggaagtgctcaaggagcgcggcgcgtttgttatcacagtcggtacgcagcgccagggtgtgactgccgagtctgggcagaaggttatccctgaccacttctattctggaatgcggtcgacgctgttcgacgcggtctacgtgcctggcggaaagcatatccaggcgctgtcaaagaatggcgtattcaagcactggatttccgagtctttcgctcatctgaaggctattgctggcgccaacgaggctgtgccgtttattgagcggcagatcgggctttctgaggtcgaggttgcgaagagtggttctccgctgaaggagtcgtatggtgtggttacgggccatggagatgcggtttcgttgttgaaggttggcacggtcgcgcccgattcgaagggtctagctgagcaatttatttggcatgtttctcaacaccgcaactgggcgcgtgagctggatggactttcagatcagattgctgcttaagtcggtgttgcatgtgaaacgaattggatatgtgaccatcaaaattgtatgagcttttttttggttaaatgagagctaagtcatttcatatttctaaaatttaatcaaatttggtaaaagtctcacgaatccaaggccgtgtaggtggatctcacattcagatgctatgggtatgatacactgcgtatgtaggtggccagcctacattcttcatcggctgatctacaatacacaaacccaatcataagctcatgtagggttggaggaaatatgtttctgcaagattccatgctatcaaggccctctgccagattcttttaggccaacgtagcgctagcacttagtgcctgtgcctgcgcctgtgccgaaccctaacccttcccatataacataccccaaccgccagtagcaatgatataccaccattatagagacatcgaacaattgaaactagataaaccccaaaccctccatcatactcagcctcccgcataccacatccccatatctcataggggtcagggctactggtcacatttcaagacggattagttacactgcaggaatatcggaccagccgctttctgaaccaagagactctggaaggcagaagtattcatgatgtcctttcgtaaataacaagctatgtttctggattcttgttccattatatctttgatattggatctccgcagtcatggttcttcatctatcgcgctcgacacggctaagcgttgtgattggcatatcgacatgtttctttctagctgagatttcgcgttggttgccctttcttggtttctgtggtactggtcttggtatgatatcgatgtgctgataccgggctagtgggcttctatacccattctattgctctgattgcagatgctttccactatgtaagcgtgtttgggtgtggagttggagattgtgttggttaacatatattgcagctgaatgatttagttgggtttattattgctcttgttgcattgaaggtacagtctggtttggccgtcggtgtggtggtcatgctgatgtgaaatatagaaatccgagcgcagtgactcgcctaaggagctcacctttggttggcagcgggcgcaactgctcggtgcctttttcaatggtgttcttctgcttggattgggcattagtatatttttacagtccattgagcgatttatcgctctacaacgtgggtgctatcgcccaggctggattttgtctcatttgattatgactgacggtgcgtttagatattcacgaccccaagctgatgttcatcattgggtgtatcggattgggcctgaatattattagcgtagtctttcttcacggtagggttcgtggggtcatttttagtaccatgctaacagtacccagaacatggacatgatcatggacatgaacacagtcatgaccatagtctatcacccacgattgagacaccggttcttcacctcgacgaggaataccttgattccagcaccaaggtaaactgcaacaaattgagcgatccaattaatggagaccgactgacacagcttagcatgacgatcacaagcatcttcatttcgaaaaacatcgctgtgcagactcaggcggccacagccatggtcatggcggccacgaccacggtgatttgggcatgatgggagtgatgatccacgttatcggcgatgcaatcaataacttgggtgtcatggcggccggtctggtcatctggctcgctgcaccctatgccggccgatactatgcggatcccggtgtgagcatgttcattgccatcctcattattctatcgtccttccctatgagtaagtgtggtaccagcatgaatggttgaaaaggagatagcgaagctgacactcttcagtgcgccgggctgggatgatcctgctagagagcgtgcccacaggggttgacatgtgcgatgtcaagcacgacctagaaaaggtatttccacctttcatcttctctttcttcattcctaacaatcgccagatcaagggcgtcaattcaatccacgaactccatatctggcgcctcaaccaacaaaaaaccctcgcctcagttcacgtcgtggtgtctgaggactcggtcgaggactttatgaagacggcgcgcgtgatcaacgagtgtttccacgcctatggaattcactccattacactgcagcctgagctgtcagatgcagttgattcgcaagatggggcttcgcaggaatcttcccggtgccaggtcatttgcgggactctctgcgaacggttgacttgctgcggatagaccagatcccttctcataatgtcgagatggctaagttttggatatcaacctgccaagtggccgagcagtaactcggccatcgcattcttccttggtctagtggtgatgatttccgcttgtcattaaaaccgataagcgcgggagaccggggttcgattccccgagggagagatttctttttttttttttcggtttagacttgtttcattaagcttacattgaacaatggatgggagcttctattacgcatagaactgacgcatttaggctgacttatgatggccatattttcagcaagaaaaacaaaaagccccaacgtttcttcaggcagaagtgcgcgatgcgagataaagtgagacactaacggcgaggctcgggcaatgtgatttgtgttttgccactggagcctagactttgtttcttttttcacttcaactttatttaatcgaatgatatctattggtactttgaggaagaagtagtagagaggggtttgatagtctaggattgcatgaaagagcaagggaggatcttgtggcaattcctatatactctaggtatcgctattttagaaagagggacagcacacgttcaatggtccctgaattatcttcctggacattataagcaagcaagatgcattagcctaggtttcctctaatattacatcgaaatcgttacaaattgcgctgttgaagtagcctgactgggtgtacactatagcctgttgagctttgaaagtaattccttgacaaatgatttactagttatccaaagggatgtcccattaacaatcccctatataaaagtgtacgattgtaccttatcaacattgagcaacagccagtatgaaccattaaccaataagagctgcatagttctccactctgcgaataggacggccgtctactccaatggatagcaaattccgattccgagatagccaggtactttgtagatcacacagataaggtgcggggaatacgtaggacgaaggactgccttgtgtctctctcccctctttcttatatatctcagttcaccctccgaaaccagccatattccatctcaaatcactcatcaatatgactcttaattgggagatccaagcccaaagaggcagagatatcttgaacaattctattccgaaacaatggcttctccccgtcgacaggctgccgccagcctcgcagaagagtgtgattgacttcccccgacaaagcgggttgttgaatgagcgcgagctcgttatcactgatatgtcggctacggcactggtgaccgaaatgggtaatggaacaatgagcgcggaagaggtggtgactgcgttcttgaagagggccgtgttgggccatcaactggtgagattgagattgggagatgtggactgtgtaattccaatgttgacatgcttgtcagctcaatttcgcaacagagttcatggcagacgaggcaatcgctcgcgccaaagagcatgatgagtactacagacgtacaggaaaactggtcgggcccctggtaagctcatatacatgttcaaatttatcacagcgagattttaatgaaacaaccacagcacggtataccaatcagcgtgaaagaacacatagcaatgaaaaaccgaacatgcaacacgggatacgtagcttggtgagtataaatccaccacgacagcccgcattgctgacaagcaaaacagggtcgataaagtcaccacggaagatgctcttctcctccaacttctatctaaagccggcgcgatttttcacgttcggactaacgagccccagtcattgatggtatgtccacaacttccacattagcggtgtatcccataaccaatgccatctagcatctatgctgcagcaacaatatcaccggcacgacattgaacccacttaatctcactctcagtccaggcgggtcctccggaggcgaaggtgcctcaatggccttccggtgcgcaccacttgggattggcactgatatcggcggatcaattcgctgccccgcagcgttttgcggtgcgtacggcttccgtccttcctcactgcggaaccctgtaacagggctcaaagtcgctgcttcgggccaggagacaatccgcggcgtggtgggtccactggctagttgttcaattgaggatctagagctattccagagagctgcattggagcaggagccttggaatattgagacatcgctgatgcctgtggcgtggaagacggttcttccgacacgggatatgactgtggctatcatgtgggatgatgggtatgtcgtgattcaaataaatgtctgctgtcagtatgttaatccatttcccagctgcgtccgcccccatccacctattactcgtgctctgagacacgccaaggagaagctggtagcggctggtgtgaatgtcgtagactgggaaccgtataagcaccagcatggctgggaagttattgtaagtgctgggtattctctgggcaagcacgttataacgctaacatagcccagcgcgctttatactaccccgaagctggcagcaagcaacgcgaagttctcgccgaatcaggtgagccggcacgcccactaactgattgggctctctcctatagccgaagcatgccactttcgcaccccgaagcatgggccctgcaagagcagcgtgatatctacagagatgaatatcatgctctcttcaatcgtcgcggtgttgactttattctgtccccgacatatcccgctgccgcggcagtgatgggcgagtcgcagtattggaattatactgcgatttggaacttagttgacctaccttccgtagtattcccatctggaatcttcgtggatcccaaggtagacatgttgacggagcaagacaaagagtacgttcacagggatgaggttgatgagagagagtggcgtaagtaccagggtccggaaagatatgagggcgcgtcggtgggactgcagctttctgggaagcggtttaaggacgaggagaccctagcggcggccaaggttattgaagggattgtgagagacaaggaatacttgaagacttgaagacttggggggcttgggaatggataaattgattcgatgaattttacttacaacacatttacacctcagctatgtctcttcgtagcaaataccatagcaagcggcgtagcagtcttcactttcttcccctcaaaggccctctccatctcatcccacagtggattaatgtccacctctgatacactcggtgtcgtccaggtagatgaataacctctaaaccagtcacagtcctgctcatccatccaatccacgtcattctcctcccaaacaatctcctctccatccctaacttgactctcaccaactcgatcattaatcctaaaagcctcaatactcccccgagcattaacatataatctcctcacgccctcccagtcgtccacagggaatcctagagcctcagtaccagaattcaaaattcttagtgcatgatcaagcatcggatcatgaacctcattcgcataaaacgaacaaacagccccccaggccctctgagccctctcatttccgacaatgcgcggataattataatgcgtaatgacaagcgtcccacccgggcgtaactcccgcgcaaattccgcaatcgcaatctccggccttgtccagtggatacactcacacgccatgatcaggtcgaccgagccagactccacagagctcctttcggcactttccttcaggaaccggaagctagattcaggaaggccggattcctcgactaggactctgcgagcgagcgcggtgtacccgtcgttcggatcagagacgatcactttgttgaagcgcggggcgagacttgatgagacgattccgcagccggcgccgacatcctgagcaagggaccaggtggaatggggtttttgagagtggtaggtaaagactttttcgaagaaagagggcgggtagactggacgaaaggtaaggtagtcggaccagtttacgccttgattggagttgaagccatattctatggtgggtgtggtttcggatgacattggtgatttagatatttgggaaacgattgaatgatgagaggtgacgatgatatattcaactaatgctctaggggtaatagggtgtatttatatgttgttttcttgttttctgcttttttttttgcgaacagatatcattttgttatttgtcattccctaaacagaggtatagcaatgagaaagtgtaaaggatcgggattaatgaaccagaccgtgtctattcgttgggattttgggaatttgaacaatcttccaatcaaagaggttcagacagagatcttcgatcagatctctagaatatctctagatctcggagaacatcggtcaggtcgatctcggatctcttctcacatctagatcacataattgtttggcatactccatatgacctttctccttggtatccatggtactatcccgtgctcgtatattgcgtatactgcagctatgcttgagtttttctccaaccccctcgagttctgcacggtggggctggtggagtcgcggtgatcttcaaatagcgcctcaacaagctcctatacaaaagaatgggctttttgtgaactaagcgtagtccgttttctttttctttttctatctataggtaggtggggttaactgcaacccaaatacggacatctcaacccgactcagctctcaaatcctgcagcgacctaatctggccaccatcttccccaaaattcccaacatccagccatttctccatggcagacttcagcgaagcatcccactcatccctcaaaatagaaaaccaagccgtatccctatttctccccttgacaatcatatgttgtcgaaagactccttcaaatgaaaaccccaagcgtgaagccgcacgccgcgaaggctcatttagcgaattacatttccactccaacctcctatacccaagatcatggaaagcatgctgagcgaggagatagatcgcctctgtcgcgccggttgtgcgctggagcgcagccgagtacattacattcccgatttcaatgcccaggtgatcaggagtcatgcgcatcagagagagatagccaatgggttttccgaaagtggggaaagaattgcgcctgtcgatgattgtgtagaagaatgggtctgtcgaagtggatttcgatgcgatgctggttttgaaagtttcaacatccgagtacggcccgtcgaacatgtagtcccataggtctgctctagatggttcaagtccaccgatgagggcaaagaggtcatctgcgtgctttggcgagagtttctcgaggagaattgctcggcctggaattgtttggctcgttggtagtagagctggagtgaaggggactattggacctttggggcgtagtactgccattttgaaattgatttgtttcagctattgatgtttgaaattgagagcgcggcgatattatatggatgctaccagctaatacctagcggagttggccgtgtatatactgtttattggactgatctatgtatgactcacgccagtgtgatttgttgtgaatgccgagagtccggacgtgataggttgattctccgaactggagcaaaagtacagattgactcaatagcgaggacaattttgcaggaatttcggaagattagcaactaattacttacattgatgtggactatagacagctgcttctccttacctttaaaataaaccagttttgcccctctttttgtacagcaaataccataaaaagatcagctggaatgcgccaaaacacatgactatcccactaaacaattgaatacccaagtagttcaaatccgcactaccatcggcgccaattgaagcgagcgcacctgctattggtggtcccacaagactcgcaaagctactcaagctttgcgccattccaagccaagttccaagactcttgggatcgggacagacgtgagtgaaaacgctcggcggcagaggaatcaaagccccggagataccacctgtgatttgggtcaaaatagagcaccgatgacttggagaatgaacttcacttaccatagaaggcagcaaaaagaacaaaccgggcaaggctgtctgcactgatccaacaaatacacagaacgcctgagagtataccgcaaatgatccaagcaatcatcgacccatagtaatgagcgaacaaagtcaagacaacacggccaataaccgaagaagcctgggaaatcatcaagatattagaggccattgagcgcgatgtacctagttttgtctccgcgtaagtcggaatgtaatagaaaggcgtgatataaccaaggtaaagaaaaaagttcccgatagcaaagctccaaaaaggcaaatccttcaatgcgcgcaaatcaatcaagctcctgcgctgggtatttttaaccttcactgcatgtctctccggccacaaaagcataatagcagccgcgatgaacagcgccagcatcaagaacgccacaaggcggacggtccaggcgaacccaacctttgatataagctggttgaacatcgttgtatagataatacccccgacaggcgcaccgctactcgaaatacctagcgcaacagcccttcttgttgtgaaagaacggctgaccaatgcaatagcagggacataaagcagtccgaatccgaggcccatgcagaccccctggcttaggaatatggcgtagtagtcatgtgcaagactgagcatcattatgccgactacacctagggtactgccgacgaaaatcatgctctggttgtagccaaggtcgaaaagtgggccggatagtagaccgccgacgattaggagccaggattgaatcgttccaatccaggcgatgtcagatgatgtcgatgatgggatataggtgagtgcatagtagctttggaatgtcccaaatgcgaggttgaggcccctggaaatcagttggttttgatattcaattggaagtcgaaagatgtttcacataccagacattgaagaatataaagaaagcaccgagaacttggagacagctatacactttactttttacagcaaaggtagagtgtattccagatgactcttcatcttccgtgatatgtgccagatctgtgacctcgggctgcgtcttgcctttttccgataacatgtttaacagcctcgaataagttcaattctaaatcaaaacggtagccaggattcgaaggaaataacaaaagctaagacccctcaaatgtattgaccagtcagtatattagccctgtaccgtatgcaacactgccgtgtttaccggtgatgcggggtgagtgtctttggggtaacaacctatcacgtatttcgaagcactgtttggagtcaatctcatgtcggatttgtaatttctacgctactaattagttagttaatatcgatacgaaaatatcacgcttaccaggattgagttgcgccattggggtgaaattgaccagcgaaaggtgtgatagtacctcggctaaaatcaaccaatgctttgtagtatgagcaatggacaagtcatacagtagattcgctagggttatatttgaggaagagcttgattggtgtagaccttgaatactacataatattcagtacagtataacatgcaatgaagataaataacctgctgggaagcatagtggacaacggaaccatttccgaagaatcagagctatcgataagtgatattgattttcacgttgagttatttttccttgaaaatatgatggggtatcaaatggagtcaagtaattttgatcatcatccaaagcattaattccaagctccaacagagagcataagtacatccatcaatacacatgtgcatgtatctgggaatagagagtaagcataaaaacatagaaacatgaaagcatgaaagcagaaaatagcactatcgtgacgatatttccatcattagaggagaaaaaagattgaacacctgatatcagaagcccaaatcagaagaactccacgagacccgggaaagccaagcccaagggcaatccagatagaaaagaaatcgcgaacaaaacaaaaggaacagcatgaagaaatgatcataatcatctacttccgccagaacatagcttttccaacggtcctgccagcagcccagcgagcttcggctagcttatccttgaaggacacaccgccgccgtagcgcacagggcgggaggaggccgctccagactcagaagtagcagtcgcactcgaaccgccgaaagaactaggagcgaagttcgtcatattacccgcatcgaacttcgtctttccttcaacgattttctgaacgacgttcaagatagcataagcagtagagccaacagcacgaatagccgcgaggacagcgacagaccacaagatgatagcgagatagatgtttgtgccgccggagtcaacaccgtagatttcggacacagccatggcgaggattacgtttgcgaccatccagatggagaccatgtaagtacggacagcacgatagtagtcctcctgcaactgggtatccgatggcgggggctcggggacctcgaggcgatcgcggaggttgcggagggccgcgtcgtagccggagtcaatatcgagttgttcggagggcatttcgatgacgacggttgagccgttgatggtctttgctgcaccgagatcggtgttgattacgttgtcacctttggttccccaagtgacgtcgtgggtgttgcagaaggcgtagacttggagaatgcagatgtagctgggcatgagcaaaaagtattggaccgaagaggtgaacatgtgccacgggtccaggtagaggaatgagctgtagaagtagagaccgacagttgacaacatggaaatcacaatgttcatcattaggctatcgccaacttctaggtcatcgtttccaaccccagcacgtgcgagtaactctttgaccaccaagtagagggcgcagaagaccgtgtagaacatgataatggcgtacacaatgataccagagagatagagattcttggcactgaaaagagaatgtcagtcaagttcgaatatatgacgaagcattttggactcacccttgcggtcgattacccagcgagataataaactgcaaacacataaccaggacacaggcatagcgcagaacaatgaagatatatttgcccatgttgtgaccaaatgggtcaagtttctcatcggttaaagagccagcaatgaaatagaaagcgaggtagaaattggcctgtgaaagtcagtggacgcccccaaagaaaacagagcgcaaaactcacaagaccaaagtaagtaaacagcaaattaaggaattgataaaagaactcgatgtgaagcaagaccttccgggtaaaagtatgatcggtcttccagatctgtttggcattgaaaatcgagtaaacagccgcgaagaacgcaccgttcagccatcttcgacgctgggagatgaactcaggaaccgagtccggcacatcggtttctccaacggcgttcttaacaaacttcaatacccatctctcttcccgtttggcgaccaactcccagcaaagaatacgatcttcggcgagatacatgttggcagtgaaaacgtctgcatcttgaccgtggagtgtttcacccttgaaatattggttcagggggccatgtccgtctgcgtcgttttgcagcgcaaagaatcgatatgcgctgagcgcaccgggcaacacagtgatgtaaccgaagactgattccagcggcttgtcgagaatattggacattttgtattcgaagttctgacttgccaccagagggttgagcagaccgagcatgttcttacctttagcagccttgatctctccagcagcgccggcaacattggagtcctgatcaaacgccttccacaagtggtagagcgccattggctctggtcgagttccaacatcgagcaaaatacaaatgttaggctgaagggcacgaccaaaggcattgaaaaaccatctgtgggagttcagcttcttcttgttgtgttccttcaaacagaagataacctgacacggaacaattcccttctccgcacccttaaacttgagatcatcatcaagcgagacctgcgtggtgtactcgtacacgtgtgcctgaacttccttttggttgacaatattcttcgcaataccctcctggtaaacacccagggcggccaatgcattgagtgtgcgcgggtggaccttcttacgtccatcagccacaatgcaaacaacgattttcttccatccatcgcggccccaagtacgcgacttggtgcgcgagcagaagtggctgatattctgcataacgccatgcatagtacgggtgaaaccaatctcgtcttcgttgtacatggtaatacaaataaacagctctgtctcgcgagtcgtggtaccaatctgctgccgaagcttatatccacgttcgccatagtcgtccggatcggttgtaacagcggtatatcgcatgtgcgtgaactcacgctcatcgcggcgagggaggaagctgtgaagaatggtgggaattttgcactccaaaataagctctccattgaccaactgaacttcttttttggcgacctgcttggatcggacaccacgacggccctgcttgtcgggtgctgggccatagtggaggttgggatccaaaacgtgcgattcgtcgtcataatcatcatcgagatcgactttggacatgccatctttctcgtctcccaacattgtcgattcgctcatgaatgatcggacactggcgcgtgaggtgtggttaattgtgcggccatcaccaccgaatggatcttcgccatgggcatcaccaatatcgatgctcgtatccattgttgattttggtccagtgaacaacggcgcaggaggcaatggtcgacggggactacccccatatcttgagctgggtgtaccgggccttggactaccgtttaaatcggcgcgctcatatccaacacttgacacggagggtggtcggatgtgggatgggctccatgggcgaattggcgatcctgtgcgtgggggaatagatgggtagacagaagtgtctgcgaggtttgctgtgggaggcgggatactgggtacactggacaagctggatggtggacgcgaaggtgaagcgacgctaggcacctggtaataactatcatagcttcgatcatgtccggtcctataattgtgcgccctggtgttagaccttggtcttggaagacgttccattttgccgcgaagctggcactaagaggcccaatgtggaggtggaggggggatgggacagtaaacaatgcactagtatcaagtgtacaatgtttacaatgtttacagggtgggtgattgacaaacagcaaggaaggaaggagttggctcggtccttgtagcaatgcccattgacgggcaattgctcgaggctcccagcctctccgtcccgtcaatgaaggagtcggatttggcagtgcacgtggctccatcgcgagggaaaccactggaatgtgaagacggacagggttgcatcagagacaattgggaagtatagggaagtacatacggagtgtgatcataatctgggtcataatgggagggcatatgactgatacctgaatcatcgacaccgtcgccgcttggcaacaagcgcatcgttcctccattcagacgtgaggcattggtcggagagtcaggatcggacagataggaacttgcgtcatggttgaggtatgcgggcggcgcgtcgccgtattcggatggcggatggcggttcatgatagaacgtggaatgtgatgtttttttgtttcaactcactgcctcatagtattccacctgaggtgggtatcgatgagacaacgatgagaattaatccccgtctctcgaagatacgacagagtgggggtagatctgtttggttcgacagatgaggctcgaggaatggaggaatgtgagtataatatcaatattaaagctccacacacaagcaagatgaagaggatcaaagaggatcaaaggggataaaagagtaaaatggatcgactggggaaacaagtccagcccgttcatatccgtcgctctgcatcaacaaggtggaggtctaggtggttgtcagggcaacgctgaatttggcgaccgaatcagcacgggaaacacttggaaaacaatactccaattagtattgaaatgaaatatcacaggagattcttcgttattccattttattccttcccaatgcaatatcaaattgtcaatatcaagtcgccaaagtattcatcgcatcttcaatatccccagtcccaagtgggtcgatgcattctgacatgaatacgccacttgaacaaaactacattattccaggtggtatcacaaaagaatgcataattctgccaaaacaagactggccttgcagatctccccaaatcccatactttcattctttggttctcgttctgggccttcagtcccaacgaacaactggttaggttaggttaatcatggcagtaggtcctttgttgatgccatgatgacaccgctcacaccccctcgttgagcagtggctctctctcccggtccactgaatcggggtgggcaacacgacggaagaggctgtcgcggccggtgtacttagtcgtggagaggtacagagagacagacaagaacacggcaaatacggtaaaggcaaagatccactgcagggcaatgatctttatagcgacttgtctgacggcgagtgctagggttatgtatatcagcaaggcacttaagcaaatgatagtaaaagaaagaacttacacagagtcaaccaacttaaacaatacccaaggatataatcctcgcgagggacgatactgaacagtccgattgcgagaataacccagataaagatgttagcaacaatacggccaggcaggttatggctgtgaacagcgactgcgccgttccagaacaacgccatcaatgtccaggcatagggaccggcaacagcgggtaggtggacgaacaccggcaggccactgtggcgccagtaggtgactgtctggttgatgaagtgggcgatgaggatgatctctgcgccccaaaattggttgcgggtccagagcagaatccaagcggcgaggaagacgttgtttaggatgaaatgggtggcgacattggcagctgccacgacgaggacattgttcttggaaaagaggtgccagacgtagctgagctgagagaggaggaggaatatcctagatgggggattaatttgtggacatcccaaagctatagacattggctaaactaaccagaaaaccccagtcaaagtagtgttctcgctgaatggagtattatgcttattggcctgcttccagagcttcttgcccttcttggtatcgtcgggcgagtgaacggaatgatagatgccgatcactacgaccaaagcccaggtgagaggtacaaagactcggtatgtattcagcgaactggcgctgtgagtttcgcgtctagcgaacgggttgaatgatgccatgatagagttattacccaagctgaggaagctgaggaagccgatgataatttttaataaaaggaaccgagagtctagaagatgggggtcttataatcaaggattaaaaggggattccccgcatatggtcatcagaccatactattccaggacttgcagatgaggtcaattccatggtgatgacatcaacgcttccatccattgagggtcacttagggttacttccaactacatagcatagttatgtactccatctcgcgaaagctgaagagaccatgatttattctatcaatcataaccacatctttcggttttactagaaatagaaatacttgtgtttctgtgaaacatggactgagcgtcatcccagtctaactacagtgagaaaataacctgacgtaaccttgatcaagcgtagatcatcgcgcacagtccttttcaatacagatttcaacctcaaatacagtgagcaagctaaaaatccaaaagtactcgagttattatgctgagcgtaggaccttgggagacagaaatcaaggaaaatgagacccgcaactgagctgagcctaccttggcgccggaagacaatatttgaacttaaaaataaacttgaatggcatgttgaaacacgcgaggcaccgagtttgattctactcagcgttttacatactagtagtatgtactccgtatgttgtagggaataagtattactgtccgaatttggtaacgcggggaaatggccagtgctctcacctcatgccggtagaaataacagtctactttgcacacatgatgtgcaaaagtactagtatcaatagtaaccatgccaatgatatggttatctagggtatcaaaaccaacgtgcaaaaatataggagggaaaagaaatcacaatccccgcgcctccctcacagcctccaaaatcctcccatgaaccgaagccggcccaacaaccataccatgacacccagccagggtacgacccagcgaacaatcaactggtttcccctcaagatctgtaacaagacagcccaattcctgcacaataagcatgccacccgcatgatcccagatcttcgagcgataatccgcactcaacggcaccttaacgaaagcattacaccctccctgcacggcaatggcaatgtaacgcatctgcgctgaccataaatccaccggattcggccacggacagccaagatgcgccgccacacgagcatgagcctcgagatcctgcgtctttgccgcacgcgtatcaatgaaccgcacaccggaagctccaacctgcgggacatgttcaagcgggcgtgccggcagcaaggctcccggacccataggtctgatggtagctccctgcccgacaacggccgagatcatctggccaagaccgtcacggtcgacgcggtcttcagcgacgagtcctgactctaggagattcgggcagccgaggacgccgattctttggatcccgttttcgactaatgagaggcagactgcgtactgctcgccgcggatgaaggttgctgttccatctacgggatctagagtccaggtcctgctagtgggggtgcaggcgccttttgcgccgaggtcaattaggtcgaggagttcggaggtggtacgtggagtgtggagaagggcttcgctttctgggtcattgaggtggatgctggttgctaggtcccaggttcttgcgagaagatctgggtttgagcggagggctgtggcatcttcttcgccgacgatatcgtcgtctgggaagacgttgtggatggctgcaattattgaggcttgggcggcaaagtcggcgattgttacgggtgaggagtcgctcttgtcaagggcgcctttgtcgacagcagagaggagctcttttgtcaggatggctgctcgttgtacagctaggctggcgagctggagctctttggcgtagggcattgaggtcattgtaggcggctttaggggttgtgtgtgtggagggtttcgatattcatccagggtagatttggttgaccggatgtagaaatgacagttctgagcgacaagtatgaaaacggtagtttattttttgggacacagaggggcatcacgtgcagcgaaacaccggtgagtacatgtatgtatccctacgtcatatctcaatctatactgatccactacaatatcaatagtatcatgagcatatctggtcgaaagatcttatttggcacaggctataatataagtaaaggcgtcagaaaaccttggacataaaattgcgtagagattcgtcagaccatactcaatatatataacaagaaatatgatcaaacgttgtatcacaagtatcaccatctatacaccgaattcaacaaatccttaagagcttttatccagaccaactcattacaacctagccttgtcttcttcacgaccctgaaggttagggtgaggggttcgaatgggtcgagtaaccgcgtagaaggcaagcccttgagacttagtcgagaactagaccgagaaattagaatacttcaactaatatctcgcgtacgagggtcatgacaaaccttgaccttagatccaacatagaaaaaagcaaagtctcccgggactaggtgatgggtgacacctgtcgcctcgtcctatttgtaaccgaaatgatcaataaccaaaagatttaagaagcagatgtcaaggtataatgggggagataccaaaatatcgatctgaccattgaggatatactttgtctcctcaaaattgtagtttgcgggtctttcgggtccagcctcgatcttatagaatcccgaggtgaagtatgcaggggattcagtattggtgcggatagagtggaagtcggcagtggtcgcgttctcgccctgaggaagggggatgaactcgtggccagcgcctttaatgacggtaataggaacgatattgctagacactttccataggtgaacgtattagagactgtatgatttgttctggaggtcgtgaggaaaaactcactgttgctatacttgatagatatggtcagaattgggacatatttaggaacaagatgtccatcaactaatatacacactcattgtactacagacggtattactcggtggcattcccgggatacagcgaagatcctgcgtgctttatcctgatgaggggaaaagtccccgtgccctcatgaggggaacactcgggtgcatcgcccggaggtggagaaatgtcgggcggagagccgtgggagccgtgatcaagtaaggtgttcttataattctcagggattgcgtgctctttgccacttcacgaagaggataaggctaaggatagaagaaagtgaggaaaaaggaagagagcggctgtacaaattctggtaccctgtactttgactacaatccacatgtcccctgatcggagagtctactatgatatgctttgaccatatggtgctcttgagttatcgaggttaaaaaatgatcattaccaggatagaaaggtcaacaagtcataatcattcaattgaggatatgtaggggaaaagccccaagaaaaaataaaaacagcatcggattaaacctcaatgtactcttgacgagggaacccagcgcggaggtatatcacataaaacgccgaaccatcatatccatgtaaaccagcaagacaagatcagaaggaagcaaatgccagctcgtaagcaaaagccaagctcatctttgcatgctgcagcatatgatcgaagctcaaatactcgatcttgtcctcggtagtgtggatcctcttatcggagttctcgaactgagactcgatcacaaatgccgaggggtatccgtaccgactagcagaagcatgatcagagcatgcatagccacactttgtctcgacatagggcacatcgcagtacgtggtgataacctccttaatgaacgcagtaaggccctggtcgacgtagtcgataataacacccacagactccttctcgccagcatcaagagtaccctgaacatacccagtcatgtcttgctggagcatggccttgacgttccgctggttcttcttgtaattagcatatacagcctgtgatccgagtaaaccaccttcctcggcagagtaccagtggaactcgatagtgttacgggcttttccgtgggttatagtctccgaccgcagcagggcgcgaagagcttcgaggatagtaactgttccacttccgtcatcatccgcgcccggggcagccaggatcgaaggcaggaacaagttgatgctatcctggtgggaaccgaggacgacggtgttatccgtctgaccgggaatgcgcgcaataatgctgaactgaccccagggatgagcgaagcgctcgacggttgcaccgtggtcactggcgccagactcgtgcactgcggcagtcacttggtcaaatagccaggttgctgactcgattcccgtttgcgacttgtagtagcgcgtgtggaaggatgtgaagtgttccaggttgcttctcatgttactcttgtcgagagtttcggtcaaaggcagaatctcgtgtgagtgctccatagcccctggatagtggacgacccgcgtggtgtggagggttccgtaggagcctgattggtattcatcggtgacatcgatgaagttcactccgtcctagtcgggggttagtactatgtcattgagtttcgaatcaaaaaaaaaaaaaatggcttaccagcttgagcgaccatttttcttcttcagttacccatcgggttcggtatggggccagttcaatcagagacttcgactgagggttttgaacaattgaaggtgctagaggttgttgctccgggttgactatgaccatggcagatgccgttgcgctgagcgcaagagtgaggaacttcatgataataaggataagcagaataagcagaataagcagggtaagggtcgagagggtttaaggattcttttaaaaggctagaagtgcaggtgttgggcacgcgccctgcgccaagccatttttggaccccgcgcgctaaaacactaaggctctgtatcatattattcttagaccggactgccggtgcatccggttgatcctttaacaatgaaatctctaacacgtacggatcatatcggctcgcaggatcttgttcgagactatcaaacccggggaacaggcacctaaagcacgaaaagcaccaaaagcctagacatgactcggcgagtctggggattgaaggtggagaatgggagaagaaactccactatgacagcgctatgactcacagccatgcggagataaggctcatatgtacacatcatggtgaagactaatataaggatacagagttattgtctacagccttgagctagtgtctactccgtacagcttcgatatttgctccactgtcaggccaactcatattcccaaatagggaactagggctagggctatcaggtgaccaatcaccaccaatcagcgtctggcgagttgtcccgtgcagacaaccttgcgtatcatctgtcccaggtccttatcttgcccattcctatcctatccttatccctctttctcctagacttgttgccttgattagatcatatcgcatacattatggctatccatccacgcctgcgaccagagggttcccagggccacctgtcgccgcaacaagccatagccatctccgcatggacagagcaacatgcagcagcgtccctgcgggatatgaccctatcggactcagcccctgcagcgacaacgccgtctacaccgactccgacgcgttcgggtccgcgcggagtcaccgtctcgctgtcgatccctctcgacgacgacgaagcgatcccgtcccaacgagtcaaggccgagtcccgccctccgacagtcagcttccgacgtcgggagcctctgcgccgggatggcctcaagacccgagaggctctactcaagggtaaagatggcagccgtcggagacagcgctgggagaacggtacgttgtatatgcactagataggtcgcggcgaatgccgacttgtacctttttgcctttggtgcaggtttggcaggcaaatgctgactaggcactaagatcgtctcttgcacaacccctgggcgcaaccgccctcttcaaaggactgggatgtccagcctacctatcctcggcatgacccgatgccttattatcttgcgcccctgtgggacgttcactattcccatgtggtggatcaccagtcggccgcgagggctgctgagagggccaatgagaagcatcaaattccgaaggtactgaggttaaagctgaagcatgcgcgtgccgcgcatggcatgctccgagatctggaagaggaggtccgtacgtttattcaaaagtggaatgaaagggagcttctacttgagaaagagggcttgcgggatgctcctgagtactcgaccagtgatgattcggaagatgagatcgtctttgtcggtcggaatgggcagatgcacgactcgcccgagcgaaaggagagactccgcttgctccgagaggagatcagctctcacagcgagcgagacggtgagaagatggtgctcgagactctggctgatgatcgtgctgctggattcgggtatgttttaagccttccctccaccttattccagtccgctgactcttctcagtcgctggttagtccactccatcgcatcctactatggattgcacacttggtccatcacagtagaagaccgacgagaagcctatgtgggcttccgatccccggttccgggaagccgcgccgggctcgtttcccacccagcttgccattcagaggccctgatcaagcccggcgaggagctccctcggcctctctatgctcaagtgtaaacttccgccttcttgccctttctcttctgtcttccagattggacatatttattggggagtaacgttcgcggatttgtaattcatgttgtctctcggctacaggtggtcatatgtagatctcattggacgtattttctcggtcgcaattcaggtcaagggatatatttcctcgtagcattgatgcaatgttgatcaattgttggtgagtggggactatgggttcatggtgtgttcagttgaatcacagtgaagaatgcgagtgggatctagaaacccccttcgttttcgtgatgcagctgtaagtctgtgcaccgaaactagctgatcatatgtcgtcatgctaaggcccaagacatggctgtgaggagcattagattgatcgcgatcgtacgatgggaagaatgttgaccgtgcagggcgaaccgcgcaggatcggatacctcttcgatatgacatgatattctgaccaagccaaagtatatgtgatcttacgtacaacaggtccctgtgcactcctataccgtcggctatcaccgtctccaccacacaatggatcggaacggaccgtggggcccacggtttccaaggttcccataacgtccagggtattgtatatgtataaagggatgtctctgacaagctggacgttgtgtcctccttgcgtataacgtctcaagaattcccaagtgcttggacgctacagggcccgagccctaacgtaacaaagcagaagtctaatctcttatggagtacaggaatctcgtgtctagactagttcaatgcaggcccccgcaatctcactggctttcggagactaaaaagcaaaaagaagtgcaaagccacgaatgaagacgagagacagggaccaccatacagcacatcgtacgctagagaggagttctcccaccccttataggtagattcgcccatagcccaggatctgtggctgattttcgctttcttttcttttttctttgctttcgatttgtgccacggcctgcgatagtcgggtgcaacggtgtggctctggataaatcgctcgatcgtgtagaacaaagagtcgggtacccaaaaatgacgagttgaacattctccatttccccaatgttctaaatacttcgcacattgtgacagtccagagttctacattctctctgacctagtgttggccggctccaactcctttttctgctttgctcgttcccctcgctggcacattctccccccgattccactatatattttggcttctcaacaaggtagcccccacccctgtcctattccctcaatcatatgattttctttctcgtttcacttgtaccatcctggatgataaccttggagatatcactctaatgtcccttgtcgctgttattctacctcggtgtcccatgagaatctgacccctctttgacttgcggaatcaaccggactatctatccacaggtccaaacgcctggtgtgatcgcttttgctctgatataccctattgggccaaccacaccacctgcggcttacttacggctgatatttgatattactcctggcttcgatccacttgttccacctttttttcgcttatttcactgtaaaccagtggaacacatacatatacatacacaccccacaacccaaatcaacattgcaagcaccatgggctcctataaatcctcccaacctggcagctacagctcgacagacagcacatcttcaaaaagtacgacagcaacgatccacagcgaccgactaacccccaagccacacaaaaccgacgaggccaccaacccagcccccccaaaacacacctacaaatacgaaaccaaaggcgaagtcgtatatgagtgtcgtgagccgcatccccgcgcctcaacctcaacctacgcctccacaacatactccacagccgaacttgacctggagccccaaccagccgagtctgcaagtccccatgaaggtcgctactgcgtaaatgagcggctagaattctatccactggaggccatcccctcaacgccttcatcctttgcgccgctcttcccttcctcgcggcggctgctcatccgccacgacgatgcaaccgtcgacggcaacatgaacttgcgcgtcggcacgcccgtccacctacgcgacggctcccagcgcgacgtcatcctcttccatttgcgcatgtacgacctcctcgcgcggaagttctcgttccggcggtactgccgggactcgggccgcgaggtgtgcaattccgcaaggcgggaggttgtgcctgctcatgggcgaaggcctgcgctgcgcacctcgtggagtagcgttttcgctgggcttaggcctggttcggccggtggtcattgtccgactgatgagctcaagaggcagcattcaaggcttgggggtggttatggacatggacatcctgcgggggacgaggtagataagggaatgacagaagagaatgagtgggagaaggaaggaaagagcgctttgccgatactcggtgagacgattttgatcgaattctcgaattatgcgcatgtcgagctgcgccgcaaagggcccggctcgaccaagaaatacgagtttgagtattggtccacgaagtaccagtggcggagggaggtccgcaaagagggtgatctgcatgaagtgtcttatttcttggttgacacgcgcaattctaagactattgctcatttggtaccggatacgctggctccgctggaggttgttgaggaggagagcaagggggggtgggtgccaccttcttcattgtggatcagtgatcctgaagtttacaagacgatgcctgatgttgccgagtaagttattctgaacccctgttcgacccctcaaccacttggctagtttctctggttctatccttagctctggatctgtatctttcccctcttttgtctctcttttttttttctttttctgtgatttctacagggggtctgtgtttcgtgtacaatgcaccaacgcatgcaccatgcacaatgtaccatggaacccctgcacaaattgacgagacatgaggctgatgaattggctcgctcttttacagtgtgattgttgcaacagggatagttgcgctagttgacgactgcattcgtcgtcgctggcatcacgagcggcgtccgtcttggatcctgcccgctcagcactcgctggtcaaaagtctggaacgcatgggccctcggcgcctgatcggccaggtactccagcgcagaggatccgcctaagcgatacaggggtcctcggctccacgaccagacaagaatggtgtattatgagatggaccggattgatgagttggtcctgcactagccagggcttggtgctgcctctaatgacttaatgatatgaatgacgcgggatatgaatgttttgttcttgttctagtttagcttcttgtgactgattcctgtcatgcattctattgtctttttttggtattattttattttttttcgctcctcctttttgcctcatcttatttgtttattgacacgggtcatctcggtttcacggcatacggattcgagcagcctgattccgggcgatcctctaatacgggtctgacagggaccaagcaggcttgcagatttgtgcatttttcattgcatggcttggacatagcttacagtttcatctcacatctttcccaatggtctattcctatgctggcgttgcatacatatgtattacgtagagtctgaccgctccaagttgaaccatggttctattttgagctagagctggtctagcttctacgaaccatggttcgagtcacgagctagatgctgtctcgtgcttcattgacctatggatctttggccatatgcatgcacaccctacaccctcattccggactttcctcataatgcaagccataggaaggaatgccagtcttgtttagggcttacgatcgattggccctgaatgaatcttttgtttttagcgcgactaagagcccaaagagcatacccctggccttgctgccttatggaaattcaagaaatagccaatatcaggcccagcatgtatttttagtacgcccgtatactgatttaggacagctactactgtaggtaccaattttgtacgtggtacttatgtagtctactgcgcagcatacatgtatggatgtacctcaaccgatcaagatgtgcggggcaagccccctcgaatccgtaatattttagccgccctataataatgtgctggcctagtgccctaccccatcggctgtttctctacgtgtttcgtgcatactcgatgttagccgcattactgagaaccatggttgaggatattgtcgactctgcatgaatgcccaacacttctccaaagcaaacaccccgtcgctccgactggaacactcggattctctctggacaatcacaaatgaactaacaaatgaacggtcgatgaattcccttcgatggggtctctgcaggcggttaaccggacgggactagccgacaacgtgaaaatgaaccaggggttcttggccgtatctttgttcgagatctctgcaacacacgaactcttgccgcctttctgacgtttctccggaaatgccacccatcccgcctcattccctcgcatcgtcctttttttctcttcatgttgatcctaggcccgacagcaactgttcatgcagggcggcccggtctgtggctttcgaggtgcccagcaactccttccgagtcaacaatgtgcgaaatgcgacttctcacaatcatgatctcatccatcatgatgagctggcaacgctttccagtgcggcccaacttggggggttgaatctacatttcgggcatcctccacatcctcccagacccgaaaaacaattaaacaataaaagctatgacactgacgctgtggccatgggctccgctttttgggcagagaccacccacagctcttttcccccctcatgcagtccctcatggttgttccagaagcccgccgttccgccgatatggttcaagtccatgcgcaaactaatctcgggagattataatgtttccgtcttgccctaaagtacttctgctcaagtgaggcaagcaagaatgagaaaaaagaaaaaaaaaaaaggaaaatccaggaaaatcgcacgcaaatccccccccaaaaatttaacccaacgtggggttctctgagttgttcactttttccatccaatccgggtccaactttcttccgaaaaagggtgttatttattctggatcctagaagaattcgccaatatctccctgtctgtcatagagcgggaactaacttgggaacatccggcgtgcccctcttccttctatagcccttacgtgctgtctagcgtttcttcaagggctgttttttgcttagtcggcgtgcgccgggccgatccaggttgcagcctcaaaatgatccgcatactcttcgccgttccttgactggtggataaggaggggggggatttggctgacgctgtgccatgtccacatcgacatgcataaaccccctcctccgttagtttgacggttaggctcctgtttgttcgaaaataaaatattttaaaaaaaagatgccaaaaaaaagaaatacagaaataaatttcaaaaatacagagagaaaaaaaacccacggggttttctttcctggccttgaagatatggcccactgtttatataactccccgcttcccattgtcgtcctcgtgggaaggttattgaaaatcacatttaagaagacctctagagattccaaacgggtccaattaagatcctgttcgttctatatcttcttgtggttttcccttgaagttcacctcttgtttctccttcgatcttcatcttcaattgggttattcacagacacccatatcctccccactcttcaatcccacttcatatcaccccaactgcaaagcccaacggctctcctgctatcctatctttctaccaagcaacaatgtcctataccaccagtccccaggggaatagtgctggcagccgccccagctggcaggaccagctccagggtaagccattggaatgcgtggtcaagcctcagcagtcccaagtttcacctcaaatgacaggacggcccgactaaaccatcaccagatcattgcacacgcaccaagctatctcctcctgtcttcaacattgtctccgatcggcgaggtacttatccgatttccaatcctcctcctccccctcagtcttcatccaccgtcttcccatgctgcagaccctgattattttatttcccttcttacgcttcgtctcaacacacacgcacatagcgtgcctctatccctgctatgtgtctcgtgtgtgggcattgcaggagggagtggagtcttgcagaaaaagacagagaaaaatgcccccccccttcacttgtacaccgacttttagtttccaagcctttggcagcagaaggctaattacttttatctcggaattgcaggaggtcgtactgcttggtccagtaccgtcaccgttcagggccagaatatcgccgctcgttactggtatgacggtcagtttatcaataatgccaaagaggacgccgccgaggttgccctcaagaccctgaaccagcagcccagagctgctaccgtctaccagggtcagctgttcccgcaggcaacgtcgtccggctatggtcgcggaactggcgggttctgaccgtgtgttctttagctcaaatatttcctactcgtcttgggcggcattctcttcccttcttgtgtttttatcaaattcttttggttcttgattctgacgttgatactgaaccttgttgctcttaatctctgggtgtgtgggtgcttgttctggtttgttttccacctgtgaagggccctcggggatccacaagtcctatccgacacacaaacccatacatttgttgtcgcgttgctctcttacttgcatttctgactgcaggaaaaacccacatcccttcaccgcactcctctcctcccacctctttctcgtgtcgataccgttctcttcccgagcctcgttgatgcatgagcatgcactgtccctcgtcgacctctacctcttcccggtttctgcaggccctgcccacaatggctcactacaatgcagagtccatgtcatgagctctggtgagaggatcaccggcatcagaaagatggacaaataataaaagaggaaaatgcactatgcaccatccctgccccggatggccacttccagatgcaagtcactaccttgtttcgggattgtgaaacctcagcatcagttgtgacacaccacacccgagattccgacggctcaggtacatgatacggtgtctggatgccattaggcctcgtgtgatgcatcgcgaatcggactctcctttggctcttttcagcgcccctccccccacatacgtgtcttttgggggtgcacacacgtattcatttcaagaaacatccacttacgtttttctgcggccaattattgtttctgtctctcccgatttgggttaatacaggtcgcctctcgcactttattcgttccgcttttgttgcgccgtctgccttgagacaagatcggaattgggctagatgcttattaccatttgatgagaggcgagaggcgagagacgagggtcccatgcattgtgccaagtgactgctgtttgtcccttcgaagacatatgacttgtcatgctcgagcgggttcgacgtcatacccgggataatttacaatcgttactcccaactgcgcggttcgaatggcaatcacctgttgcatttgcaatagatgacaccccctgctgcttcgtttctccctggagctatggacgaatgtgtgtttgtctgtgccacggtggatgtgaagcgactcgcctaatcccaagcgcgttgcgacatggcaaatatggtggtggaagctacttggaaaaaggtcacaaggaggagttataggattatcatgggacaaaaattttcattttccgggcatctactttgtctagaatttggggtttcattttgatttgatttacgttctgcctgattattcgatgcgttttgccttgtttttttgtttttctttcctggttcagatcgggtgtctgcgactcacagagggagtttctttggtatctgttgtctcttgttaggctgcgttgggttttggacgttcggacacggaactggaccggggttatctattatattgggactgtaatggtcggggtttgatttgtatcagattgttctcttttgtctcttattatactacagaatatctatcgacagcactttacgggtgaattcttcttcttctcttttactaatgataggtacactgctggagccattgccggctggaacagactcgcccctttctagaaaagggtgctgtacatgcttaccctcgtttgaggtactattgatcaccgcgggttcttgccgcattggcctcccgtccgagcttacacatccgcgggtagcacagcgttggccatgtgtctagccaaacattaatttccgatgcatagcggccgagttgggcagcattccaaatggccgacgctgttcttggataaaatgaattaaataagttgtattaaaagctgatattaatattaatcgcttggcgacgcggagcatctagatatatttctacagtacgttgtagactcgacgttagatgttggtcagttactttggactgaaccatggaacgtcgaactctaataactatcaactctaattgtctattttgaccaactcattgcaggcctcgaatgaactcgaggtgaaagaagagaatctcagtatggattttcttaataattagggctagcgctatgctcggtatgttgcatatcgccacatagaatgcacattgtacaaaccctctgaagagtgatcgccaagactcctgcttgatctagtcgtgacaaaggtcgatctgccatatttgtactcagccttcctcgggcggtggctatgtcgatcaaattatacgggacagcaagtacatatacaatgatttatttcaccgtcgtagtcaatccaacctatctcaaaccaagaagcactttctaaaatacttgagaaatccaaaccatcacactgctatctgtcccattccaagcagataccttccacccaaataccaccatgtgtttcggctcatcgcgaagagagccgcatgactcaccgcccccggggcggcgcatacaccacagccctgacgcctacagccagtccgcatacaccaaggactacaagagaaacaagcgtcgtgcaggtcagaatgctggtgctgctggaggtggggatggtgtaagtggagatggtggcggcgggtgcggctagatctagagggttgggatgggcgtgggatatctttattgatttaatagctgcgattaatattgactacattacttttagggttgatgggatctggaatatgatttgaatttgaaaatctaggcaacgggacattaaactcagccgacatgtacaaatcttgcactttactcagtactccgtaatcgagaattcatacctaatttgtcattaaaagttatctatctattttatgactcagatacgtgcagtccaccttagctcgtgagctgagtcctatcgacagccaccacaacgctccagccttacacatttaatacgcgaaactctttccatctcttgccccgtgtccacggcggttgcgccagccgtagtagagcctcaatagaatgcagccagatgttacaaagagaagcaatgctgcatttgtccaatggccggtcggatacccgatctttgcttcgtcgcttttgtagatccaaacgccgacgatttggcctggtgcaccaaatgacacgttcagtgcgattgcgagtcctgcgccggccgttgagtttatattggaggatagccagcctagcagaggtgggatgcaggcgaaggcaccgctggctgcgactatgaggcatccgtatcggctctagtgtttgagttagtttatgacgctcattggcttgacgtgcccttgggatgattgggtgacttactagatatgcgctagcagggagaactgcggagacaaggaatcccattgccccgatgaaagagaatatggctgaatggagaccccggctgtaaatgaatatcaggtaagtcctaagtcccttagtatgtctcgatatagaagacgatttacctgttgaagtagtccgcagaccaagccacggttatagtcacgacataggctaccgcgtatggaggcactgtcatcagctgagcacggagatgagagtatcctagtccagcagtgatggcaggcgtgaaaagagaaagactcgagaatggcgttgagatgccgaagtacaccttttatctaattagtcctccagattggcaggggaaaaggtatagagaacataccgcataatgagcgtacaatctccaatccgtcagcgtagccttagcatcctcccaagacatagcatgggcagaacccttagatccttccaaaatcaacctctgcgcagcaagctccttctcttcagcagtgagccaattagcagtctctgggtaatccggcaacacaaaccagaccacaacagcagatgcgcatgatggagcgccctcaataataaacagccatctccaagcagaaaggccatgagcgccattcatatggcccacaccaaatgcaatagccccaccgaatgctccagctagtgttgccgaggcgagaatcaaggctacgcgtatggatcgctcggagttgcggtaccagaatgtaaggtagtatacgaagccggggaagaggccagcttccattacgccgaggagaaatcggagtcctgttacttgggaataggtgtggacgccaccaaggcctattgttgttgcaccccaggagaacatgaggaaggcgatccagcgctggtgtttgttaatggaattgtaataatggataatgtgtttgggttagacgtacacttggacggagcttcttcagaaagtaatttgatggtacttcaaacagtgcatatgcaatcaggaataccatgagtgcaattcttttgtagtcagcgctttggattctcttggtcaatcaatgtttgcgactcacgtgtactgatacgaagtcatattagtttccgagagaagatcattgtgagtgtccgaattcaagattttggcattgcctagatatattagctccaagtctatccgatatttgggaccggaggcataccaacgttagagcgatcaagataacaaagcaagtagattgcagcgcacaagggaacgatgcgtagatcttgtttccagaccaaggccttctcgcgtgcattgagggcatcgtcgacaatttccgtgctggcaagctgcactactgtcagtcttctcaagctcgtataccataacactagtaggttattataataatgggagaagggagaaagatacttctgaagcttgttcaacatctggcatgtatttttcggttgccatttttccaggacttagccacaatcacacagaaaagtcgaagtttcaggaacaaagaaatcagaaaagaccgcagtcctttttttcgccttcttttttccccatgtgatttagcttccccgggcttttgtcccccgggttgttccccgcactagggctactcgcagttcctccgatgcctcaccggtatttcggtattggggtattgggaaatccgatttcgggactagatctagtgttcgaagcgttggtttcttagtctaaaatgatgcttcgtagatattatttaggtgacatttgattggcgtctcttgtttcccctagatccccacatcgaaatctcagggaccgtctaggaccgattccaaaatgaggcaatacaagaagcattgataactaactagcgacaagtaagagttatcattggttttcttagtattgaatagtcttgtaaataatttgtatgttagttaggaaaatacattatctgtgaatcatattgctccgacaaaactaaggtaaaatatctcccacgatagatcagcgcattgaagaacttctcatacaaataagttgaaatacttgcatagagcgcgtgttgtataaaatcaaaagagcctcgggatgcaaacaagacaaacatcttatcagataaaagtgttcccgatcgcatcgcaaacactcaaatcacccctccccatgctatgccgccgtttgctatccaagcgcctcgctaaaacatcagattcagctctatctatatccgtcgcaactatgtcgactaccaccgctccctcccacaaatcgatgccctccgcgttaacgtttgatcgtcacgccaaatgctcggtacgtccttgtgataaacatttacaacctagctactgtaacatatatctaatgcatattatggtgcaaatagacaactaaggcccgtgcgagtacccttcaccttcctcacggctcagtgcctctgccgatcttcatgcccgtcgcgacacaagcatctcttaagggcctaacatatgatcagctgcgagagaccgggtgcatgctctgcttgaataatacataccacttaggtctgaagcctggtcaggcggtattagatgcagtgggcggagcgcataagctacaaggctgggatcgcaatctcttgaccgatagtggggggtgagatatactaccgtcccctcgcaaatcgatagtatgtactaaccgggtatattgctattcagtttccagatggtctcacttcttcagttggcgactgtcacagaggaaggagtgcgattccttagcccgcatgacggctcgccaatgtaagtggcttcgctgtaagccctataactgaacatccgaaatactgactttttatcaggttactgactcccgaacactcaatttctctccaaaattccatcggatctgatattatcatgcaattggacgatgtgattgcaactacttcgccagatcatgctcgtattaaggaggccatggaccgttctgtgcgatggctagatcggtgcattgcggagcataaatatcccgagcgacaaaacctcttttgtatcatccagggtggtctggatcttgaattacgaaagcagtgctgtgaagagatggtagcacgagatactccaggaatcgccattggaggtctatctggtggtgaggcaaaggaggagttctgcaaagtgtacgtgcctctactttcaccaaaaagaaagaccgaatgaactgaccaaccaaagagtgcatacatgcacggaaatgctgcccgagcataaacccagatacgtcatgggcgtagtatgtcttactgaattggttcttctgccttagctaatgacaaaattagggataccccgaagatattgttgtggcggtggctctcggtgcagatatgtttgactgtgtttggccgacacggacagcggtaagactcaatcaaccctccggtttggttcttgcactgatattaattagcgcttcggtgatgctattgtctcatccggaaccctaaaactaagccataaatcgttcgccgatgactttggtccagttgaggagggctgcacctgcacttgctgtcgtccaactgaccaaggtggtcttgggcttacacgagcatacatgcaccacatcacagccaaggagaccgtcggcgctcatctgtaagtgtggactggccacattatcttatttcggttctaatacttctacagtttgaccatccataatgtccattatatgttgaccatgatggggaaaattcgacaggccataattgatgaccaatacccagctttccttcgcaaatttttctccgatatctatagaggcgataaatcaaattatccggagtgggcagtaggtgctctgcggggagttggagtggacctgttggcagactcatgactgcatggccattgattttgatcaaaagaaaagtgctttgaagaaagaaatgagctattcactttatgccatagaaaagcgtgtgtatcaattccaggtgtcaagttgactgaacgtggagcagattccatcaaacttttactaaaaataagacgtcggtcctctaccctagtccaaaactatatcattagacatatatcctaaaagatggccggatatatctgtagaaagtatcattttcgaggcttcagggaagaatatcggtattccttaaagtctcgtgtagatacgcgtgttgattggatactttcctttgaataagtttgcactataaaagacgagatcggcacgtgaccacgtgtcgcggtcgacgcgatccaccgatctccaagatcctccatcgtccacttgatacaagtccgtcaaacatcaagagatcgcctgatagaacgtctctcgctaatttattctgcgccatgactcaagaccaagttgccgcagtccccgcggcatcctcgccgccatctgaccccccgcacgaagagcaccaatacctcaacttaatacgcgcaatcctctccgaaggcgagcataggcccgaccgcaccggcactggcacgcaatcaatcttcgccccaccgcaattgcgcttctctctctcgaagccgaacccagaaggcggcgagccaattcccattttgcctcttctcaccacgaagcgagtctttttacgcgccgtgctcgctgaactactctggttcatctctggctgcacctcgtcactcccactctccgaagccgggattaagatttgggacggaaatggtagtcgagagttcctcgataaatccgggctcggccaccgcgaagaaggcgatctaggacccgtgtatggattccagtggcggcactttggcgccgaatatgtcgacgccaagacggactacaccagtcagggtatcgaccagctcaaagatgttgtgcacaaactcattcacaaccctttcgatcgccgcatcatcatgagcgcgtggaaccccgctgatttgaaaaagatggccctgcccccgtgccatatgttcgcccagttttacgtctcattcccgcctggcatgaagcttgatgaaaagactggtcgtccatcgaagaatggtaccttgtcctgtctgctctaccagcgctcttgtgatatgggtcttggtgtgcccttcaatatcgcgtcctatgctcttctcacgcatatccttgcacacgccgcggaccttcatcccgggactcttattcatactatgggtgatgcccacgtctaccttgaccacgtcgatgcgcttaatgagcagcttgctcgagaaccaacagagttccccgagctgcgtattaagcgtgatgaccggggcagcgcggttgttgatggctggaaggaggatgagtttgaggtcattggatacaagcctcacaaggccatcaaaatgaagatgagcgtttgatttatataggtttctgatttttggttttcgggcactgtccgagtcactgttttgtatgataccaattattccgtgatgtatgccacgggagtatattaaaatagcaatgcgctcaaagtccgggtctacatgtatagcaaatcaactcatgcattgttggatcagaacatgcgtctatatgtaccaagctggcatatgcttcgaaaagcaaaaagcaaaaagcaaaaaagattaaacagagaatgcaagtaaatgcaagtaaatggaaagaaatgcatcatgcgctcccaagaacagcaccagcgccgcgaagcaacacaattgtgtcgccttgctttaccttaccagcaccaatagcctccgagaactcgaggaattccccagactcaacatggaagatccgcaatctcgaattctcctcatcgacccgattattaaaattctgaacccgcaacttcttcgccgcatcatcaagcacacgcccaaccttccacctcgaatcaaagaagaaatccccagccgggggttccgcagcctgcgtctccgccgtaccaacagcatgcaaatacaatctcttctctgcaggaaccgaggcatcccccttagccgatcgcttcaacccattaacagcgaccgcacgcgcagctggactattcggcttgggcttcatcttcggcagagccggcaggagagtccccttggcggcagcctgctgcttatcgcggccccaggtgcgtacgcgcgcgaacatagacttgattgtatcatttggtgaagcgacattggtctggcgcgcgcccagcggggtaatcttggcgcattcgtgttcctcgcgaagacggtgtttcaggcagtattggtggttgcactgggggcagcgcacggcggggtctttgagggtgttaatgagggttttgcactgggtgtgggcgcattggtcggtgttatagatagatggcttttcgggggcggtgcggttctcttggctggtgttgtttcttccgttgcgacggcgggcccattcgccttcgcgagggcactggtgcgcggtttcggtccggtgatctagacagaatgtgctgtggcaggattcgcaccggaaggggaggaagtcaagttggccgcagtactcgtattggcagtgccggcctagggattccaggtctgtgtcggccatttgcgtgaaggtttcgtttgggtccctggaggggctgcgccctttggatacggttatagggggcattattatgcttggtctttggaattggggatatgacacaggaaccgaaggagaatgatgcgtgggatagactagggattcgagtatgcgatctgatagaacgcgatggcacaatcgccatgtgactaatgtggggaaggttctgggcttatctagatacggagttaagttcggagttagttagtccatggaatgaacgcatcagtatgaacagggaagatctggcaagatacgagttatctcgccagcctgcgaccgtcgagatagtcgttgcagagcgaagcgactgatgatcacatgatggcccattagaacgctattatttctgagaaaacttggccacgtgacacgtacatgagaccttttgatttatacttgcttcgcaattaggagaaatatcaatgatttcaatttcttttatgaattcaagttcatcaggctccacagtcggaagaaatccccggatgggcttcttgacttaaagctactctatgttgtatgtatatatcagagttcgcgtgtggacatatcatgaaatattcgccattgacaaatgccaaattccaaagaggatagttacacggcatacaacgcatattgtaatagaaataggctagttatgctcagaaacccagtgacatatcaccccgaaccggtgtcggtactctcaaagtggaactgtcgaggaaatcctatttgatctacctgctggtgtattggtgcccagtgaagaccacacagaaatatcacttgaaatcaatctttaatgccaaaatcttggcttttaatactgaaaatattcggtgtatcatactatctgtaggcatggttcgagcaacatcgaatgtgacggttatagtcattaacactaagtagtgaaagagcctaccaaggtatgtagagtgactacggtatgtagaagtggagatatatggcgatgcatagcacccgggaattcttatctgtgacgatcatgtctatttattggagaacctgatacatttgggcgttcgctattctcttaaatgcttctcctagtttctagaggaggaaatcttagtatctttgttcacatgaagctatttagaaggcttgacggcagtagctagatcattatcttccatctatctcacacagctctcatattggttgatcacccctcattcttcagatacattgattgtactctgtacgtgcatcagaaatacgggaaaaccttttttcgaggtattgttaagctttcatgcagtcggtgcctccaaggctgtttcgcctatatttttctagttgcaattaggccagggaaatgaagacattcccacttgcttttttatagacgatcgactagtaatgtactactactcttactagcgaagctgtactaaatagtaacggacaggccggaactcttttcactgcctggttttgaaggcgaacggaaaccccactctgcagaagtcggtgaaaacaagagaaaaactcatcagatatcatagtgtaagtcaatatcgagatcgggacaatgcggggagggaccatacattagagaccatttagggcaagcatacgcgttgtcctagacatcctcgtatgcctcgaggggtacggatgtacaactcgaacttctagaatctcgtccctgagttataaggtcgatcaccgcgcggcgatctcaccaatcaccggcccgtatccagcaccggcggccggcccggttggcactgtgattggttcggatggccgaggcgttgtctttttcaggcgatctataaatgttgatgcttgatttctcgataagatgttggcattacattatagaatacgtgctggggatataactatggaggggtttcttcttccgttcactctttttttcttccccctgctttcatttccagtgcagtctcgcaaccctaactcgtttacttgatcagtgttttcccacagtaagttgtctcatggaatgccccgcgttggatttattcggtctaacagtgccaggccagttagattgcagctctaccaaaccttgcccggtcctgtctatagaccacgaacccaagactgccagacggtcacgaacggatgatatagcattgcccgcttaaaccatacatcataaaccatgacgcagcaaatccaagagcaggctatgccattccgtatccagcacactagaagccggatggcagaactactggcggccgatgtactcgttgctgcaggttcagcaacactgattacgccagcagtcatgatttttgataggtaagccaagttagactccatcttatcaacgtacgtacgttaaccaatataacccagactcgttgtcgagaaatcattctataaccaacctcttttcccggcattccgcagacacctctggttttccctcacacaacctgcaactttcttaacatcacgacccagtctcctcgtctggtccctttacacggcaacctttgccaccgccaatgcttcagagacaattctgagcaagtggtaccctcagattgaccatgccatctcaggcatgaccaccttcgctgcaacattcatagtcaactcctctgtgggcatttggaaggatgtgaagttcgcacaattattcggccacagcaacacctctataccagttacaaacaacacaaccccaccaaggacgactccaattaccacctccacctccacctccacctccaatacaagctcaacccctaaaacggcccgctcaatcggccgtaccagaattcccgtagcaacatactcagccttcctcgtccgggacgccctcacaatctttggctccttcagtctccctgctatggtctcggcctccattccggactccatcgcctcccaagaatacctcaagattttgatcgcgcagctcgcgattccagcgtccatccaacttatcagcacgccaatccacctcctcggcctggatctctacaaccggccacaggtaatgccgaccaaagagcggatcaaccgtatcagtcgcgactggattagctcgtcgctgctgcgcatgtgtcgcattatccccgctttcggaattggcgggttcgtcaatactgagggccggctttacttgcatgatcaagttagtggtcggcggaaggggccttgaggaccttatatatacagatacagattcatagataaatataccctttcttttctctttctacttccactttcaaatgctcaacggtcttgtgtgtgctttatccgctatcagtcttccccactcccgatatcaccgggccggttggttgtaggcgcttcatctcgggtcggcaagcgtcacaaacgtcaattttagactttctgactggggttgttaattttgggcgagaaatgttattgcatcactcgcctcgaagactggctgccgatgttggttgaaatataccgctgatttgactgcacggcctaaaatgatgtgttattcttttttagggcttttttcgcagatggcatgtggttatgtctgcaaacacgaatttcgtaaaagagaatgcaaagtccaaagtcaagaatcaaaatccactataaattgccttgctttatattcattggcgctatggttgtccacactcgcctgacaaagcaaatgctctgtgacggcaaagtcataggtcaaccaacctattgtgagtttatgcggtgcaaccttcttacgcccatatagaaagacgactggctttacatatgttatgatatatctccctatacatcaacactcattgggcacttttccgagtcgaagaaattaaattagaccttatcagaaggctcggcatgtttcaaaagtagcctcacagcctatggtattccgatatgtttatctctaccggagaaatataaatactagtttcttctgggcttgcttgaggagaatcctagcatgctcaaagaacattcgctttctatgcggccaatttgttcgctctcggtacttcagaggaatgactcaatgtaagcgggccagcgcagggtattccatggctgttttccgatgcctaaacttggaagccaaagcctgaacgacagccgcaaagcgaattctggtcggtgcgtcattgttggagacggatgagtgagatcacttcacccacagatggatattatcgcactgctgtggatttatctcaagttggctatctggcatggcggaggaatttgatagaagtatgaatacaagcaagctcatctaacgtcgctgtcaatggcctcagttccagacgcacggcctttggatgccgagctggtagccgaagagtcggcatggctgaaatcgtgcaaggcatggcacgggtcaacaaaagatgggtactgcccaccggcagcgttgaaagacgacggtctccacatatgctggtgagcgatattgaccagtttgccgaggaccgcaatttcgagttttagcttgatgctgtaaagtgtggctttgagggtcgtttgatagatatagaagttcctaaactcgataatcatcaaggcgatatccatcaggatacaagatacgttgacggcgagcagctgcaggatagtcttacgactgatatggtcctgatttaagcgcagcatgcgattcgtctcccacatgtacaacccagatatgataacctcctgcacacagaagcccgtcagctgcaacttctccatgacatcgtacccggcaaccgaggccgcagaactggagaagttggccgcgtacgtgaggacggttgtgggcacgtgcagcaggaaaatattcgtgatgatcatggttttcaccatacgcagcacgcgcatgttctgaatcaccagatggaggcgcgaatacagcacgaatgattggccggttaccatggcccaccaaccgactgttaagagcgtgacgggcacccaagtggcagatgtcagattaaagaatttgagcaggtagccgaccgaatatggtaggattccaacgctggctatcagcatgctccaaaaataggcgccttcatagcgtttgaaggttaggaaaatgagcacgactagctcaatcacgttgtaccatgcgacgctgatgaatgttgcgatggtgatacggacgccaatactgtcgcctgtataactgccagtgatccagttccctggactggagttgctgagagaggacatgtcctcattgggaagatctaatatgggaagaagagagcacacggaccgtgaagtgacgtgttttggggtttttttctttggcggggttgctcctaatttattggaggctggcaggcttttccgtcctggccccaaggggtgccaagtgggccaaatgtaatagttggaatttattttaataagatcaacatcaacaattcgtactagatgtgacccacttgtcgtgttccttgatgcgaggggtcatgataatattgtatacggagtacggatactgtattttcctcttgatttacttcaacctgaggcggaagctgttatacgttagatttatcattccagtcttcctccagtccggaagaatttcaagtctagaacctctgccatgggactctccctgccgttactgccggcattcagtcacatcactgcgtcacccataccagatctgactgtgctggaagattgagcctccccatgtatgctcctagcataagcccgatcctcttcacggcaaagataacttggcataacaccgacctcttgtgctggcttcttcaagcctcgcatcattttcagatcataatgatttcgctcggtccgcaaaagccctaagccccttgtgacaacatcacctctctctaaaaaacgaagctcgcattatccggttgacttcacttcgcggtgaccatcgcctcgcacttggtcttctgcgtcgtaaaagacaagattggctctttgagcaaggcatgcgggacaggccagacggcagtagatcagatgaatttgacaccgtgggaaggagtgcgatgtgtatgggcgcgatcatgggaatttcataattaatcgggtttgatcaatgtcaaagtgaatgtcgatggactattttgcgctggaatgtacctaggaataggatggcgtttacccgggacctcgggaagcccccaggtcctcatttttacgagaatgcggaggtggcgtagttaccgtatttgataggtagacaggggccaatctgatagtatgtggccttgtattacagtggacatcacatattattattgaacgcgtggttgattctgtgtagtgaagtgtagaggagtatggactacatagtagtgttgaggactttgatcagccgtccaaacattagtacattagtactagaggtactctgtaccagaggaagcaagcattttggcgcttttttactttcaaactctgaactatatcaaaacaccaaggagaagctaaccttctgatttctaggttgacctgctggtggctgctatctatacaacatcaacaaattcaaagatatgctaatgatatagagacgctctatcaagttctatacttaatatggctatgatgctatgatgcatgataaatggatatagacttcaaccaatcaaggctacttaaaagcgagcgaaccaatcatatattggcgtcgttaaagattaactccgagatagctccacccaaggtcgcaaggatatggaaatccattgagtcttgagattagttcctttattccttcctcaactaactatagatatgcatgagtgtgtcccattagcccgtaaaaaggccaaaacaggctgcaagacttgcaagtaagtatatgtccatcctcattctagcactctcttaaccggatcaagaatccgccgggtcaaatgtgacgaaggccgaccagcttgccgacgatgtgtatcgactagtcgggtctgcgacggctatggtatatggggaggaggtggaagtccttacgggcagccacagagcaaccgaactctatcaacctactgcacaccagtcccagccggcaacctcagccacgaggaacagctgtgctttgactggctgattcaacgaacagcaaagaagttcgccggtttattcccatctgacttctgggagaccttggtttttcaagctagcgggcaggaacccgccgtgcgtcacgctgtcattgccttgtcgtctgcgcatcgtttccaacagcgattcgccgccgcgccagataaatatgacgaagagtgtttcactcttcagcaatataacaaggcaattcaacacctacgcaacaatgcaaccgacaatagctattctctccgagtagcgctgattacgtgtatgctctttatcaccctagaatacatgcgcgggcagtatacagtggggaatgcacatctccaatatgggataaagctccttctcgatatatccgcgccacgtccaccgtcatccatggttccgaccgttttgtctcccgaagaagatttcgcctacaacgccctggtcgacgcctatgtccgattaagcattcaatcagccatgttcgggcccgtgcctttatacgtgtatcttgtaacaaaagacccgcaaaccaccagtcttccctatacattcaactcgcttctagacgcaagacgcagcctagacgacctcttgaacagaatacactgtctaaaaaagcattaccacgactactacgcatcccagacaccaactagcgaccaacaaatgctcaatacacagagcataatcatttcagacctatccctttggcgtaaaacatacaatgtctcagtcgcacggctcgaatccaacaaaatatcagaaagagaccaaaccagctatctcctcctacggttgcaccacgaaatggccacaataatggcctcagtctgcctctcaccagaagaaaccgaatcagagctgatatttgacacatacaccgataactttatcaggataatgactggctttgtcgatatatggaaaagctggacaacagcagccttcagcgaagaagatctctctaaactagccaccggacccgacgacctgaaagccatctttcacaatttcaagacgatgtccgacatgaacacgattctggaaacttctctactagagctcctcgaaaaggcgtctacagtcaaccacttcctccaagcaccagactgtggtaagagtgggttcaccgttgagatggggtacatcccgcctgtatactacacggctcttaagtgccgtgttccgcggatccggcgccaggctatgagggcattgagggctgcgccgcatcgagagggggtttggaatggctcgattttggcggatgttttggaggagattattaaggttgaagagggggacttttatgctggcgatgtctgcgtcaattcgtctgttggacatattctgcctggggaagaggatttgcttgtaccgaaggtgccagccgaggcaagagtctcagatgttagagttctcctgccggatgatgttgctgggaatacttatgttagctatcggaagagggctgggggaggcgagtgggtgacttttaagcagaagatcggtatatagggggcgcgatatgctccattttgatcatcatctttcattgtttattgtacaaagtttatatcagccgtgggtcgtgatttcgtaacatgcttttcagtatccataacaccccaaaaatcccgtttcctactgttccaaattcataatgactgaagtcttatgccttgcatactgtattacttcccgcctaccttttgactccgcaaaaatgcagccacctgctcatgtcttgtgacaaaaaacatgcgcttccgatctgacttccaaaccagcacgccaatctccgcggcatactggcagggagcctggtattcagtcaagctggtgaaatccttgaacaaaaagcccgccgtagcccggagacggtcccgctccaactgccataatctgatctgatctgtcacagtaggcgggagcacagatgccgggacacccttgccgttggattgagcagcgctgtgtttccgcagctgtgggtgcgcgtgcgataataggtaagagataatttgatcggccgtgattcccatctcgattgctcggcggacagactgcctggtgattttgccagtgaccagattggggaagcggtatttgaggtttgtgaaaagggagatgagagatatttgtaggggtgatgaggtgtaggcgtagagccgatagttagtttcgatgatgatgaaaccggagctagaaccaccagacggccccactggcccagtgagggatcctgtgacaggattgctcagagcgctcgagtcggatgtaagtgtagttgccagacgggtgggataaaagcgtgttgcgtcggcatcttcctggtagacaataccaaaatcagccaggtccgcgagagtgcgaagttggttgggtgtcatgtggctcttgtcgtaagaagatccgagttctagactgctcaggaggaataggaacgagagaacctcgacgctatccatgccgatggcctcggcgctctcgacatacagaatcaagatatgccagacctgggtattcacatcctgaagcacaaatccgaacccgtctttggtgatatcgacacggttacctcggatctcaaccaagtgtcccgcttggagaagctgtttgacacccttgctcaaattgaccgtgtcacgctgtccactcatcaaggcactcgttccaaccatgtatcccataacaccttcccactgtcgtctagcatattcatccaaatcggcaatcgaggttggggtttgttctggagcttgggagaatacaccgaaagaatgagagtcctcggcacccatcagagcttgtcgaagcgaagcagcgaacgggttggtgaccatgtacgcacggacgttttcacctgtgagggtcgtagaaagaatgtgaagtcgacccaatattgaaagcgcattatctcgttcccttgtgtgaacactgtcagtaatggctagagcaagacctgtcagataagccactcacttcttgctctctgcgttgacccaaacttccagatcagcagttgggagagggtctttcagatagagtagagccatcacaaagcattttgctatattcagtgttagcacaacgttcccttccgtgtgagtaagcttaatgtacccagatcgggcagcatgcgccggaagatcgcaagggctgtggatggttgttggtatagcttatagaaagtcgtcccggggagtccctccaggtactccagaggacgggatgttgcactcgccatagtgagctgtgagaaaccaaattcccaggcaactgaagagaataaggtgcctatgtgaagttgttgaatgaaatgacgctagtacggtggccgaagcggccataagtgcagctccgggatgcccccgagtcaagtactggacttgttgaccctccctgtatcatttctttccatatccagcccatttatcacttctgagaaatggcttctctgagatttgttcgctcggtaatttttcaaccttcactacctatcattcactcttgttaatgcatatctatctataggtgtgggagtccttccgagctacctcgggtctggagcctcggtatggaaatcgtcccaacttgcctctacctttgagatatcagagaagaactaacgtcccacttcaattcgattaaaggctgttgagtaatgtgagtatgcgccagtttcccaaaggttacattgaacttatcactgacctctaccatagctccgtattacagccgccaggcccggtgtagtgaactttgagctggatattcagaaggagcatacagtatgtctcgatgtgctgcagtctctctagcgcatgtctctgggaatttttctcgggactcaacttctcacatggaatgcctctgacactttcagaaccgcctgaatatcctccatggaggcactattgcaagcatgggtaagagatccttgcatgtgatcccaaagttgtgatgcttggctaaaatatgctctagtcgatctcggaggctcgttggctgtggcatctcgcggcttgttctcgacgggcgtctcaacggacctgaatggtacgtttatgaaataggcatgcatcccacctatcttctctgtttctaataaatcctctcaagtcacatatttgaactcaggtggcagagttggtgaccgaatcatggccgtatgtctttctccatctatcccgatcagtctctcaatcctactaaacgggtactaactttgacgttaggaggtgacttgtgataaatgtatactacttgacttcttcgtcacaccccctcttctacttgataatggccatcaactaactagccgcgcttagttggcaagacccttgctttcacgaacatcaagttcacgaaccccgacggacatgtctttgcccgcgggagccacacaaagtgtgtatcttatcttatttccgattgtaaactgctaatgtcgcttaggtacgtagcccaggcttggaaggatcctaataactttgtggaggaaatgaacaagcacaagggccaataagaacgaaattgggtattacgatgagaccggagcgttttggtcccaagtcttacattctatgtacttcaagccattgagaaagacatccggagaaaagatcagtcggcattgcagcagcaaatccgagtcgtcagaattatagaagacaacaagtctgttcatatccccaaatgataccactctgcttgagaccagaaatcttacgcaagctcattgcgtgttactatgcagtagctaaccatttaatctgtaaattgaactgctcattggagacgccccccagagtacaaaagaagccgagaaagtgaggtggtctcaacaaactcctttattgagcgctgctgttaccatttaacttatgaaacaattcatacaagatcttcatccccatcttcatcagcccccatagcctcatcctcatccaaatagtcatcttcgccagccggtgccgcatcctcaatggtgatatccccatcacccatagccttaatcttggcctgcgtcatctcgaagacatattgtccaaggtgctcaacactctccattggcgtaccctcaatggtggcgttagcttcccgcgacgaagggaacatctcgccaggagcaagcatgagcttatccggtcgttgcaaaagaaggtcgaatgcgggtttaagttcgtagcacgattcgaagacttcccgtcggccgaggatatacagacccagtcgtgcgcgcgagagagctacagtcaaacggcggacgtcgcgtagatatccgacgctgcgggttcgggtgagagaaaggatgacgtctagaaaaatgttagcaattccaatattccgagtgatgtgaatatgcttctgggggaagtcaactcacaatcattctgctctccctggtagcgatccaccgtcgtcacaatcttgggcattccaaacatatggttctttccacagcggtgactcaatacatcccgaatcagagcagtttgcccagcatatgtggctaagatcgagattttagaagcagggtagcccaagagtcgcatgtactgatacatggccactgcgtactccgcttcgcccaaattctggataaagtggggtgttggctcccgctctccagagccctggtagtcgggcacattgataaattggtagtcgaactggaaaccagcattggcctgctggtactcgggggcactttcaaccactggaagatccccgagttccttgtaccgccagcggaagagctctgcaatgctaggtcgtgcgcgtccctgcttatccaagttgatcactgggacacccaaccgcgccagtcgcaagaagagactttgctcgaaatgggcatattgacggaaacccatattctgaatgatgggtgaattctggtggtgatcaccacagagaacaacacgcttgagaggaagttcgccgtttttcgtattttgcagagcgttgggaatgaaactctcaacttcagtaatctgcgcggcttcttccatgaccacgttgtcgtagtggaatcctagatcggcaatttcttgccggcgcatagctgcatgagtcgaggtcatcgcgataattcgggcctcctttatgaggagatagttcgctttgtcgcgaggttgtcttaggatctcgaagggccggatgtcttccaactcagagaagattcgggcaatgtggcgttcgcaacctgcagcagtatcgatgatcgcctccttcgaggcttcagcttcaaatatgggctggggggcatttgcgaagtatgattggaacgggaaggatgtaacaatctcttcatttgatattccttcggagttggctcgatcccagaatttggcccatgttggctgcacgtaaactgtattgaagtagcctgcagtctcgcatgagtttccatgcgcaccctcgaccccaagcgatgctgccaagcgcatcacttctgataaatagtgattacggttgtcaaggaaggattcgactcgtccatacttgctgtagttggaatcagtgtccaattcttcctcgccgtgacccagtcgcaacaagtgccgttcatcaatgtcaagggcgataattttctggaataattgattgagggcttggttgctgtgtgcaatgagtagcgtccgttcgttggggaagttgtggtaaatgttgttaattatttgagtggtgacatcagtctttccagtaccaggcggtcccacgatgacggtgagtccaggctgggttccagatgctatggcttccacttgggcgggtgtgaatcggattttgttcaatttgggggtgtcgacggggtaggggccagggtttggtggcttgtatgtagaaacacgcatattgctaggcgccaactctgtcgctgcagctttttcccggcgtcgcttcttcggcgcgtggggctcttctgcaggctcttggttaacatattcaagaacgtagggtggaccaaagctagcattctcagcccccgaaggttcaatgcccgggaagctttccactaaatgggaccagtccaaaagggtgtctctaaagtcaacagtgctaagtcggtttggcagctgtgtgtattgagcactagcgggatctccatagcccaggaagatgtcctggagccaggaaggaagagtcatatcagagacaataagcttttgcatcgtctgcaggattgacttgaagttattctctctgccctttctccgtgcaatcacgttaatgagggggtaaatgtctggtttgccgtgggcctgctggtccttgtcggctttgaatgcagccgcatccaagttgacaattaatctcctcgatcgtgccctaggatgagagccatttgcctggccagaatgttgtcgcaatgcgcggccttgctcgtcaagtacttgtacaatctcggccgttcgaagatgggtcatccgaggggcttcaggtgcaccttgttccgactgtgacgagctggactggacggccagaagataaacgacgtcatcaggtcggagtgtgtcccactctcttctaacattatctgcaagccttcctacctctatcgcgatctcagctcgaacaaaagccggatttgttgccccgaccttgggtggtgcgacatcaataatagcaggctttgaaatcgggatggccattcgagagaatccctcaaaatttaaggttccatcgcgtgctgccttcggctgcatgcgtttaacgagggactccaggtccttgcggatttggaaaaatgcttctgatcggtagagaaggaaggagcgataaaggaaatctccgagactcagatactggagattcaactttgggattgccagaggcctcgatccgtcgtatgtctcattcctcaacaaggccgggtcatagagggtttcctccgtcggaagtggactcaacttctcgacagcttcttggaaaggcaccttgcgttcataaaaagatgccaaaacttccagataaaactgacggtctagagtgacgtccgaggattttgggtagcttgttcggaatcctaggtgagagcaaaggctctggagttccgactcgtctagagcagatagctgtccctctagatccactcgctgcgcaatcgagcccatattggagagcgcgagaatcatgagcttatctttgaataatttcattgaggatctttgcagctgggccaattcctggcaatgcaggtcgtaaactccctgcggagaaagagcctcaccagagtaatcatcaattgcaaattcgacaaaatgtttcagaagactgtggaagtcacgtagaagggcgttgtcgggcacatggtagagctgcgaaaggcgaataaccgatagaaggttgaggtcctttaacaacgtgttcacgtagcgcctagtgggaagctgactttcgagatcaaccaagagctcaaggaaacgctcacagtacagcaagttctcagtctggtccttttcgggtccgttcaacctacgaaggaaatccaaaagcattgtatatagccatgaacgttcgaagcgcatcttcgctttcaccgcttcatctccagcctcgtatcgcttcccagaggccctccacgccttttttaatgtcggggcctttgcaataatacgatctctagtctcctcactggccaagttgtgccagatcgagatagaaacgaggggcgcgcattccttgcggattaggacgttctcgagtgactgaaaggcgctgattataaacgatatgatagagagtcgagagcgagtcggaagtgaatgatcaatgctcattgagagaatacggtggaagagattggagaagtcatcagcacggtcggagaagatatctgcaactgtcagcatcgtcacgttatagatctcgtcgtattgactcaccccatatcggtaagtgctcgcgatgttttacactgacgatcaatgcaatcaacagtacgtgatgattcgacgcatcctctgtgtaagtcggccaaaggaacctcgagaacagttagcgttagccttggaggcatgactagagaggaacgtacttttcaagaatgttcaagttctcaagaatcaatagcgagtgactgttgaaagcctctgcttccaaaggatcccacaattgcttcttgatgacatctggtttagccttgcggaccttcgtgttgagccagtgggccttggctagctgcacccacgggttttcttcacgaaagtccaccactgtaggcctggattcgagactctgcgccatcgcaggagtcagtagtttccttaacctaataaattggagtggtcaaggaggggttgattggcgcagtcgggaacatctgcatcggtgaagctggggggagcttttcaaaaagtcttggctctgagttccgccgagccgcagtcctcaatcaatccgaccactttgtttcccttcttcctacattcatctaaccttttttcttcccttcgtaacctctcttcaaagaacgactgaggagaacccttgaaaagaagctgaagaccgcaatcaaggaagtcccaaggtcctagaagacactcgacaaggcgcctacggacacgctcgagacaacacttcaagacaacccctcaagggccccttacaaaggcgcctgggtagacgcttcaggaaatggcgaacgatgatattggtggtgttcaggtctacaaaagactagtggacaatctcctggatcgcgccgcgcaggtcaagcccgacaagcagatcgaaccccccttgaccgaaacatacctgggcgaatcgatatggcaagtgccgtctgaggatgacaaggttacaaagcacttaagcccacagactaagcttgcggccgtggaaatcgcgtttcgcgagaagttctatcgcgttttggtacggcccgtacaaagctctagcccccagggcatcgttaacagtttgttataggcctcgacttccatcggtgaccctgctttcattcaaatatggaatctccttgacattgtctcgatattttctgataatggtcagtctccgcagttcctccgcagtccctaccgatctaacaatcaccagaacaatgcgaacccggtctgattttctggctcattgaagagctcttggatagtcaaactatccatggctgccgtaaggtgtttgattacttggagtcccgaagagagaggaacaccaaggtcagcatggcccctcatctactggatctgttgcaaagctgaccccgcacaagaaacatttcaaacagaaaagcttagttattctacgatcatgcaacgagcttcttcgccggctctcgcgcgcagaagatacagtgttttgcggccgggtgtttatctatctcttccagagtttcccacttggagacaagagttcggttaaccttcgcggcgagttccactctgagaatgtcacggcctttgacggaattgcaaatgagtctaccgataagcaggagcaggatacaacgatgactgaaggggctgaacccacggcacccggacaggcagcggttgagacctcttctcagcaaacatcgaaagcgcccaaggtcgttgtttctactggcgatgagaagaaatcagatgaagttgacttgaatgcactctacccgctcttctggagccttcaggcctatttctccgcaccgagcaagacgttcgacgctgaacggtttacatcatttaagactggaatggaagctacgctagctgcattcaagagcatcaatactgagatggaaaacgagagctctgcccgagcatcagaagatgcccgcaagtcgaacaagcgcaagcgcatcgcggatggtactgaagtcgccaccagtttcaacccgaagtacttgaccagccgggatctatttgacctcgaaatcagcgatactgccttccgacgacatgttcttgtccaggctctcattcttctcgactttgtgctttctctcacatcaaattccaaatcacgcctggcgaatacgacgaacaagtccgttctttacggtttcacattgaacgaggaggataccaagtgggcgaccagcatgcgaaaaaacatcgaggaatatttgcaacaagggcccggagggaaattctattatcgtatggtggacacagtcttgtctcgagacaagaactgggtgcggtggaaagccgagggctgtccattgattgaacgattggccatctcggcggcggagtacaaggcttcccgcgagcatgctaccaaagcgtatgccaacaaacgccttcgtccgtccccaatgggctctctcgatttgaagttccttgccgacaccgaggcgctggccaatattgaacgtctcaaggaatccgaccgatacaacgttccttccgccgactcgttcttgaagggcatcatggatgatgaaatggacatcgatatggcgatgactgacgaggacaaggcgattgccgagggcgctaaagccagcaagtcctggcgaatcttgcgtcttgctgcgaaaggaaagcttgctgcattcgacaaaattggagagggcaacaacctacaggtcttgtttgagagtgctacaaccgcggatgatcacaatgagctcagttcctccggcgataccaaggatatctcccaatccctcgatggagctcagagcctgcctcttggaaccaaagggctcaccgaagcgaccaagactgctggatccgaagagcctgttgaaggcaaagtcgagacagctcaggatcttcacgatctgccccagggcacagatgaacgggaaatgcaagtcgaaaacaaagacgtcatcagggaacaacaagacccaagcaccgataacaccagggaagaggcccttgccgccgctagcgcctcgagagaggactctgccacgtaaggtcagattgtggcttgaagatattccgttggatagtcaatggcttggaccccctttttgtccggagaaaatcctccaatggacaccatctaaggcggtcacgccgcggccaaccacatccagattatccaggcaacctgcaggattttatgcatcaatatcacgaagccgttggtgccatgatctgggagcgagattaccacatccgtgcacctgcattatctgcgatacatctgctggtacggttcagcacttggtttctctttttcaaatacgaattacggagtgcgtcctaggtcatccctgctggcggagttgaatcttcctctaccctaattgggtgtcatttcacgagcttcttttttcttttttctttttatttcaagaacccgcctattcagggtcgccctcggtccagattcgtcggggcagaattgacaaagatggcgcttaaacagaaacagaaaaagaaccaattaggcccattggctgattgcgggcacgactcctgaaccgaatccggcattctacgggcagcgggccaatgacatacgacctaactatgttgtacccaagactaaagacctcgatgaattagctaacgtggagaccatctgggcacaattcttttgatcggcaactctaatacaaatgacttgaaagggttcctgcatgaagtacggagcagctaaagtagaaaaaggaataatcgtgttctgtccatgttctccagacctcatttattttcacacgtggcatgtttagtgtcacggtcatgtttcactttttttctatttttctatttttctatttttctatttatctttttatctttttatgtatgagaaagcagggggtaaggattaagcgacttcggaaacgagatcagtagggaaaaaaaggagagaatatggagtacggagtaaatatccaggattacggagtacattgtacacgagatcacaaaagcaaagtgtccccattgaaccattacatgcagaagtgggcaccatgtttctcccctgtccacttgggtttggccccctatttttcgcgagcctagggaagaatccttcgcttcgacggagtagtttgcgatatagtacactatattggcgaatagcgtgcactgatcgtctagcgttcgatgcgcaacacgtataagttgtgcaatcaataaatcccaagaataaaagccacatgggaattggaacactatcgacacaagcgttgagtttggtctccaccagtggaggctatacaagagatagaaggggacgtacaataacggtagccatgtggttcgatctgatgcactggccatgtgggtatgggacggaggacggagtatggatgtaccgacgagtgtgctggacataaaatccgtgtctatcttcgttctaatccggtttaggcaaatgttgatgttctttctagatcgggaattgtacagatatatatatataggtataggtgtatgtacatggacgtgcggaggcactcacatactcgttctattctatataggttctatccctattttatatgttgccagaaataccctgtatactcgtatactcgtatattcgtatactccgttatggaatccgccaagagatcgacttgcgtcaccttaatcttctaaagtccgatggtataatacccaggacgtgtaagtatgcatcccctgtacgagtacgtggcttgctactccagtgtacggagtacggagtataagtggatggatgcaatgcctcggtacggaagagataaagtcaaatgcctcgatcgctcgatctggttaccccgcacagcacgttccagaagggagattgcaaggacgtacacatcatacgttgcaacggtatgatcttgatctttcctttaatttgaatttggccgtcagggttcaacacgaaacaaatcaagcagaaacaaattggcctacgtagagatcgtcactccgtggtgtggatcgaaatccaacggctccgagttttctcctccgagatccacctgcttggggaacctaagcggtatgtaacttatccgtacccttgatatacatgatatacaccgcgtacagggaggcaggcgctggatatcttcgaagaaggaaaaccgagaaacccgagaaaccgatgccccaggtcctatccgatatatccgatgtccttcggcagaagtcctgacccacatggatctctagaaaacgaaaagatgtatcattgacgagtaccgttgacgcctcatttcacctgcgactcgaattgtttcatatccattgtggagatttccaggggagctgtgtgtctccctacaactaccgggtggtatatcctcgctaaaaaactccttaactaggtatgtaattccgagttcccgaatgcgacggcgcaaggcccgcttggtggtctttcctgaagaaggtaatgcagctctcgaaacttccttgacgaggctcttccaaaggctatcgtacaccgtttcaagtattgctcatgtggttctacattggttcctttgactcgggcagtcctgatttgcgatgttgatgctccttatatagagattgtgtgtttgagagtcccctttttcccgttttgccaatttcctatttttatttttttcccattctccaagccttttgggcgctatctccacccagccctcgactgcttcgcttctttccgaggcatttcacgatggagctgtggcgggcagcccgctgagtggctgttcctcttggtccttgatcgatagccccgagggtccgctcaggatttatggatcttcagcacgccactaacacagccgactggcccttcccacatggcctggtctgcgcatttccggtgagggtcttacatctgtactccgtaacggttgcaggaatcaggctttttgtttgaactctctcgtctgtccgacggattacggagtatacagatcccagctaagcttccacggccaattccaaacttttatactagaaacgaaaaggacatacaagtaccgcactgtctcttctctctcctttatcttcccttagtttcgcttttccgggtgccgggtcccgcgggacccattttctcccctttatcgtccaaggttgagctgagttgacgtggtggttcccagccttgcaacttggacgattcccacattcccaccacatgaatcctggtcgctcggcggtgtccgttatggtgacagcgtcttgtttggcatactccgtcctccgtacaataggattccatcggctctcttaccccgtattctgtcggcatattctgtacctgtcacttcgtatccagggacgcctgacgggtaaaatgggcattggatcggaggctacgattttattctccgagacgatccttttagtttctgatatgatactagctgtctgtaccgtcccataccatctgtaacctgtgttttacaaacgaggttaacggccaccgctatggaccgtttggtataggatcttcgtccaggcaaaatagatcgaatgttgatctgtggactcgagtctatgttatgttggactttctacattgtacatgtacatcttcgtctcatgcccctcaggctccctgagaatggatttcgctgaacggcctgcatctgggtttttccttttgaaatggaatgtttttagagaggacaggcctaggatgaatagctaccttctaaccatactatcccatgccatcttgtatacatgggatttatcgggtggccaaaatggtggaccctggcgccattccgtttaatatccctgtatttccactgttacctcgcttggctattaaaacctatttgcctcacaggatatctccggtcgatcctagtctagcggcattgtgtgtccaggtaccacatttcattctggtggatgcttctctctcaacatcttatacagcccagtaactgcccagctgcgtaacgatcatcagaatcaatcggaaccgatctcagatccaaagaaaaaggaaaaagaataaaaaaaaaaaaagaataaaggttggcgacagttgtcccgcttgacatcttaccctcgtttgggccttctttttccctcttttctcctcttcacttgacacgcatactttttggcgcctttaatcgcctttcttattttctctaaatcagaaacaaagcagtcttaccctttactctaattgccagaagaaaccctgaccctttttttttacggcacttccatcagacccaccaacgtctcatatcggggggggggggtgtctacggtatcctttttgggctagaatttctcctattgcttctgttgacgaaagtcttgactctacttctttttccttttcaaaagagaattcgtctttggttttgaattatcgtgggtaagggcaacacacacacacacacacatacacgcacccgcacccaaactagacccttaccatgtcagtcggtggcccttgtctttggttgccttctttatcttcgccagttcattcgcccctttctgcggtttcatctcatctatcagcccgcaatagcgagagactctctttagggcctaggactatctcaccacggctatctgcgcagaagaaagaggagcctgccgttcctgttcctgtgcacgttcccgctcgtcctgtggagatgcagccgactggttataaggctgaaaacgccttgaataacccggcggcacagcccgtcagcatgggctcagcgccgtacttggagagagatgtttcacaggatacggtcaaccaccgcttggaggcggcgaaacaggatatgcttccgcgtgttaaattggagatcccaagtttgaatcagcggggctttttggctgttcagcccctggtcgggcacggcggtcatcccgaggaaatgggtatttcatcgttttcgggctcgcatgaccagagagacgaccacgacagagaatcgacaatcagtcctgatgacgataaggatatgatgggtagcgatgacaatagatcgccttcgatggagaagaagaagatgaagcgttttcggtatggaatttcttatcttccaagtaccacgcatggttgctgacagaactatagattaacacataaccaaacccgatttctgatgagtgagttcactcgccaggcacatcccgatgcagcccatcgagaacgtctgtcgagggaaatccctgggttgaccccgcgtcaagtgcaagtctggttccaaaataggtagggtgatcaactagttgaatcgtctgtccttgactaacgtaggtgtactgtcaggcgagcaaagctcaagcgtctcactacgaatgatcgggagagaatgctcaaatctcgagcccttcctgacgatttcgataccacaaaagttctccgcacgccctttgagggcaaacaatcaggtatcacgccagtggcatctccacaaggctatggcgttccgaatccggatttcggggctttgagaacactgcgtaccgattgctacgctcgaccaaatgaagacgactatctcgtctcacctctcagctctgcatcgacagcaggaacctacatgtcctcgactggacgaaacgacagcatgtctcagtcgaacatgatgttccgtcctgctgcgtcttcctccatgtccgatttacatagaaccatccgcaacgattacccggtcaccaggtcaagtagcttgtccgatgcatcggcccatccatcgccgtatgcggggtatcctatgcacaatcgtttcgcggggccacagccaaatcagccagctctaccctatatgagacgacccatagaatatgccatgcctcgtcatccaggcatgggaccttatgatcaacatcaaccgtttgagggctcggtgtcaccgacagacactcaaggctcacatcttacttatgacataaacaatctaggttagtatctttttccttgcctcgacattctccaacccgatttcctaacatggttttatacaggcccgcaacaacagggctacaatcttggaatgggctctcaattaccaccccaaggccgacctatagccaccatgcagaacctgccagtctcggcagcacaaaattatcggccctattcctacgacgccaccgcaggcccaatgggtacaccaattccttacacacaagcaaatacctcgactctgagtctcccaacttccgagccatcatacaactaccccaactatatccagcagtgagaggggagtaagacatccttgaaaaaagtcggctgttacttgtctgctatacgacatgctcgttttgctttccgcattttctccttcgtctccatctcatcacctccaccttttggttaactggttagctgggttaaccaaggatccgcgatctatatcagcgagtattaatcattaatcgttctcatagcgttcaccgtttctggtttctgggtttcttctttgtcctgtgttatcaaccatatttttaaaatctgtttcttgcatgcatctacgtttcgtttgttttcatatcatctttccgttttgtcgcgtttctttgggtctggtctggtctggaatctagcgttcattgtctgggggacagtttgtctaatattaattgtttctgatctcgctgcatagcctcggggtggaaggtcaaaatggtatagagatgccactgtgtttagaagcagacagaccactgagtctacaattcacttgaaccaataaaccaagttgtcctcgacaattctctactttcatctactttcatgccgccgtaaacaatccaatactcgacaaattatgtaaggtcgtagctccaattaagcagttccaacctccccacactaaccttacaagtacaacccagcaacataggtcatccaaatcctgcctgtcgaatcagagtcaagacaaaagtaatcaaattcttcttgtctcagctcatccaccatcaggccacatcgtcccgccactcaagcgacgtctatttgctgttttccgcaatgggccaatcagcgtccacgaaagataacactgtaccacgtgacacccactctcacagccaatcaaggttcagctattgataatcaccactcatcctctgacgcatgcagaacagtataaaggaactcgtaaaagcagagtgttattttctttctctcacacactctcatcttgactcaaagcaatatcatttcgaaggaatccatccatcaatcttgcaaactcacaaactcacaagttcctcaacttcatcttacctctcgatcttcagaaaccgacgtcatatcaaatcaacccgccaaaatggtccaccccactaccacctgctgcaagaccacacaggacggctcctgcgtctgcgccgctcaggctaagtgctcatgtggccagcagagcgccctccactgcagctgcaacaaggcttcctctgagaacactatctctggtccccgctgctcatgccgtatgtgatttccctactctagtgatttagaataaactttatactaacattgaaataggcactcgcccagctggccaatgcacctgtgagcgagcggtcactgagaaccaggctgtttctggtgagacctgtgcctgtggcagccgtcctcagggtgagttttctcctactacgaatgcgattcgtgttattcaatgaatatcctgctaacttcggctttagcttcttgtacctgtgagaaggctgctgctattgattccgcccttgaggttgacttcactggcagtgcttaagtgacttgattcacttgtactttttgctttgatggggctccctatcattgaaaattgcatttttgtccccgtcttgatggggtggcgtcttgggcttgggcatttttactgggtgaggttgcttagggttatcaataactgctggatgagatacgagatgcaaatttaatactattcacggcctactacaatatacagagaataagttatcacgagtaacaacaggttatattcaatgcgccaaagctgtaaaatgggcttgggtggcttcgaaacgggaatatacatacttcttaaaatagacctacgtacttgatttcctctgccacttcttggctatccctttccgttttagtgctcaggctttgccgcttttgctcactgagtagaactgagcatcacctgatcattacataagccatatgactcgctcactgagcgtcacctaagcgctctgatttgctcactgagcaccacctgattattacataagctcaagacttgctccttgctcaccggagcaaagcacagggagcagctaagtcagcagctcacctcaataaaatgcaccacgctagccccatccaaacgcagtcgttcacccggcactcttgaccgttgtcccctcaacgaaaggctggtgtcatcaatttggcggtcgatcctggttgttacgcctccacctggaaggcaaatgcacagtggggccacattattggctttactattctgcgcctatgccactattcaacctcgccgagctctacatagttgcggaatatatccaaccctccatttttggttctacaatatctttacgcctctacctagaaggcaaatgcacagtggggccacattattagctttactattctgcgcctataccactattcaacctcgccgagctctatatagttgcggaaaatacccaaccctccatttttggttctacaatatctaggaatatcttagaaaaccctagttagaggtttataaatctagtttagtgttttattctgattttttttagttgattttttaacggactatcgctcttgctcccgactgcttactcctaggaatacgacttcagctctagtgatagatatccgcaaaaatattctagacctattgattatacctactgtatgatctagccgcctataacgaaatttgcggcccctcatttatctaaaatattctaactagcaatcagaaaatacctcattctaactaaagtctgataggacttcctaggagctctcagacatttcgtgccaccacgatatgattggtgagataatatagatcctaggagcttaagtactggtacccactcgcgagagccgtgagtgctaacgctgagagtcaaagtatataaaagaaatactgatcccttctagagtgaacatatccaagtttcaagcatttctactcaaggtcttatgaagtctgctcataagttcagcagccttcagtatcctgggtctgtctcttgtcagccccttagtaagagcaaaagcctaactattatacagattgcctgatgccacaaagaaaaccgataacctggtcgatattcaagatctcctattcgatgagagttgcaggaccgtttcctgcataatcctgagctctgagtttgttatatatggccgaggcctaaatggaaagatgtaagtgactctcgcaattttaccagtgggagcgcgagaatttgcagggggcctgtggctaatgtgactatatattatccgtcatgccacgataatcgagagcctcgcgtaccagttttcagtctgtgtcattctactctgacttataggcatcattttgccccctggccctagcttgtccgaccatgcttcttcctgtcgtaggacttaaaagccttcaatcgagtcatggtaattgagaaaatcagaagagcttatctattgaagcgaagacgtggcatcccggtttgttgacctatttagacttgacgagacaaccaaaaggccgttttctattcgctgcccctcagtgttccggcttcatattgcagacctggataaaagtctctagaactgacaagacacccgctagttatcttgttatatttcctatgtttgccaggtcgatgctgttagattacactgttttgatttgaggttcgtgcaaattaggacccaagttgcatcgtcgaaattaattatgcactaacttagaaggagagagagagatgaatgatctatgaaatagtagggtatttataccctgtagatgtagcaaaaaaacaagaatactagtcggccggcagtattttcagtaatttttccagttggtcttctcaaagtgtttttttacctactaagcctaatcaggaattttctgcaactttatatctatattcaaaggataacattgaaccttgcatcctattcttcttctccattcattccaagtttcagtctcactactttgttcttcttaattcattctaagtttcagtctcacttctttgaatctcattatattcgatttatcttcttcaaacttacccaccatgtccctccaagccattcccgaacatcatccagatctcccatccggtcctggtgttttcacactagaacagatacgatgccttgaagaggctgcaatcctccttcccgagcctcagccgaatacatccacaaacgccagtggtaaaagaaaaatttccgctgcattcagtgcaccaagatctatgtcaagctcatccaccacctcgtcgtcgtcttctgcgtctgttgccacccatggtttccagcccaatgtcatccgaaccttcgacatcccaatggcagaagaaagtgtcgaggtgcttgagtatattgggttcgtaccggatgttgccagactgatctatgaccgatattgcggccgcccaagtccaagccaaaatcctgatgacctaatggcatatgtcactgcacatctcgcctctcttagccgacgacaatacgataacatgagccatcaggaggcgctcgctgatgttggtcttacgcaccaaattcaaggagcaatcacggacccgagattctcacacatcttcggtacccagaccctcacttactgggcacaagataccgttgaaaccaactatgccgctcttcttcgtcaacagcaactgctacaaagtcatgcaaacaagcgcatagctcataaaaagaaacataagcggcccaggcatgagccgagccgagaagaccaagacccatctgagcagcaacccgtgaccgcaacgatcaacatgacaccccaagatttccagttcccagacacatatgtgatggttcagcctgatgccaatatcctcgccgatcacatttctttatacaagggcaaggcatatgatgaattagggccagcgggtgatatcattgagagtgatggaacagtcaacctaagaccactcagcacataccccggcggagacttcaatttcgattttaatgcgcaatactggacccccgaaattgaaacggctgaagagtaccgcaaatttgcagaaaggagaagccctgcagccgatacctgcattattcacattcaggttcagcgaccattcatcaacagcctccgaatggagaatctatggtattctcccaactggaaagagtacatctggacttgcaggagacaggctacccctcacccgaaattcgaccacctctggcgacctgggcaagctaatattgtcaggggccccatctgttctaccctcagcacacagctagtccgcatccgcagagaaaacatccaaagtcatatcactgaggacaacgtgatgcgattgctgtctgggagaaaggccactcggtgggtattcgttcaacgcgatgtgattgatcggttagcagaacacattcgagggaagatgcatttcatcattttcgaagccgcagttcgtttctcatgacatcggtctagggcccactttccgctttgattgcagccctttttcgggtcgttctttatttatctgttgacatgtttctttctcgaaaaatatcaccctctatggtaaaaatttactcagtgagcctgactctgagcgccctcgtaaaagcggcggcagctaagataggaaagccccgcccggtagaggaaaaatggtacgtataactacttaggtacaacgtgtcgagcctcaaagcttgtttgcaatgggaagatgcagatttttaaaacaactataatccggcctcttgcccagtgtttttgctttggattttccacatggaatcagtctgtccagacaaataaataactacaatctactccgtacacacacttacacctgccatttgcaccgccacatcggatcagtattcctccgtcgccacataccgccacagcggaaccgggctgatcgacagcggaagtgacccaaatgaaatacagagcggacaagttacggggatggactcatctcgacttcgcgtgctgcccggctcatttatcataggatctctaatttgagcgctattttgtatgttgtcgcggttcaatcggatagctccggtcccccaccaaccaaccagtgctgacaagctccccagaattcaaatccctcaacacaacacccaaccccctgttttccaagaagctcccacgagcccggaaatccaccatccgacacgttgcatggccaatgccccataatcgacacgccagcataaccgggacatggttgtgtgacgctgtgcgtccgatcgcgaaccccctgaggtgataatcccgcgtggcatgcgagggcgcacctcgaccgaaaacccccgccatactgtagtcgtcttttctttcgcatccgtgggctgataactgcactacgctatcatcgccgctatgtcgtcaatgcgagggcttgtgcagttcattgctgatctgcggaatgcccgcgctagagaactcgaggagaagcgcgtgaacaaggagctggccaatatccggcagaagtttaagtctggcaatcttaatggttatcagaaaaagaaatacgtttgcaaattgctctatgtctacattcagggttacgatgtggactttggccatctcgaggctgttaacttgattacctcgcctaagtactctgagaagcagatcggatacttggctgtcacgttattcttgcatgaggagcatgagctgcttcatttggttgtcaacagtattcggaaggatctgctcgatcataatgaattgaataactgtttggccctgcatgctgtggccaatgtcggtggtaaagagctgggagaagcgctcggctcggaggttcacaggctgctcatctcaccgtgggtttagaacggtttttgttctgtttatgattattctaacaccttttagtacctccaaatctttcgtcaaaaagaaggctgctttaacgctgcttcggttgtatcgaaaataccccggcatcgtgcgaaacgaatgggccgaacgaatcatatcgatcatggatgaccctgatatgggagtaacgctctctgtcacctctttggtcatggcactagctcaagacctgccagaggaatacaagggctgctatgtcaaggctgcacagcggttgaagcggattgtggttgacaatgatattgctccggactacctctactaccgcgtaccatgtccatggatccaggttaagttcctgcgcctgctgcaatattatcccccatcaggtatgtttagtgctctggcaaatcgttactcggtttctcacatacaattacagaggatagccatgttcgcgagattattcgagagtccctctcccagatgatgcaagctgcaatggaaacacccaagaatgtccagcagaacaatgcgcaaaacgccatccttttcgaagccatcaacctccttatccacctcgactctgagcacaatctcatgatgcaaatctccacccgtctaggcaaatacattcagtctcgggagactaacgttcgataccttggtctggatgcgctgacccatttcgccgctcgggctgagacccttgacccgattaaaaagcaccagaacattatcctaggctcgctccgagaccgcgacatcagtgttcgtcgcaaaggattggacctgttgtacagcatgtgcgataccagtaatgccggccccattgttaacgagcttcttcgatatttgcagactgccgattatgccattcgagaggaaatggtacttaaggtcgccattcttactgagaaatacgccgccgatgcacaatggtacatcgatatgacattgaaactgctctcactggcaggtgaacatgtcaacgacgaagtatggcaacgagtgattcagatcgtgaccaacaacgaagaactacaagcttatgcagcacacactctgctaggctacctgaagtctgattgccacgaaagcttggtgaaaatcggctgctatgtcttgggcgagtacggccacctaatcgccgaaaacgcaggctcaagccctattgagcaattcctggctctgcaggccaaaatgttctccagttccgacaacgcgcgggcgatgatcctctcgtcatttgtcaagtttgtgaatttgttccccgaaatcaaaccccagctcttgcaaatattccgcctatacagccattcccctgattccgaactgcagcaacgagcatttgagtacctgtcgctggcgactctcccgaccgacgatctgctgcggacggtctgcgatgagatgccgccattctcagagcgaacctctattctactttctcggttacaccagaaaacagcaggcgcgagtgagaagaagacctgggttatcggtggcaaggacgcgaatgcggacaagcaggaaatgctcttggcacagaacaccggtctcaagcgcaccttcacgacaatcgtcaatggtacgcgcactgggtccggcaatacaccagccagcccggcaagcgcgtcgaatgcggccagttcatcgggcgacttggcaggcctcgatctcagcggtcccacagccccagctcccaacatggccagtgctgctcatctgaccccagaatgggacatcggctacaaccgactgtatttctcgcgcgagggtgtgcttttcgaagatgcacagatccaggtcggactgcgctcggagtaccgcggtcctatgggtgtcgtgaagctttatatctcgaacaagtccacgtaccccatcgggtctcttaccaccaccgtcgacaacccggcctctcctcagttgaagatcgacacgaggaacctgcccgaaccaacagtcgcggctgccgggcagacacagcagactctgttctgcaccgctcatggtcccttcgcggatgcgcctaccatccgtatctcatacttggccggtgctctccaggcttacacactccagctgcctgtcctgatgcatcgatacatggaatcctcgtctttgtcagccgaggagttcttcaagcgatggcgccagattggcggtggacctctggaatcccagaagacctttgccttgctgggtaagaacaagactaccaacgagaggttcactcggaggattgtcgagggattcgcattcaagattttggatggcgtcgatccgaactctcagaacattgttgggtgcgccgtgtaccaattcgaggggggtaagacgggctgtctgctgcggctggagcccaactacgagaagaaggtatgtatcagaagtcttccaattcgtttcgtattgtcatgctaactctttcgttcagatgtatcgcgtcactgttcgtgccacccaagaagaggtccccgggccactggtcaaacagatggagctgaagctggcgcagggcatgagagcagacgaagccttcgattaaagcgtctgcaggtgatatggaagcattcatgtatatctctaattgaattatcgagtaaaatattagcaaatgttcctggcggaacatcgcatcttttgtataatccttgtcagtttagtaacaaatagaggtgcgatatgctatacatgcatctaatgatcagcattctcagcggtgacaccagaagcccaaacacttttaatcttgacgaaatcgtaactcataaccacccccagtcctaagtcaaacaacattcgcctccgccttaggcggccgatccccaaagatcgtagttccaaccctaacctgatcactaccaagagcaattgccccctcaaaatccgagctcatacccatactaagctccaattcagcctcatccccaaccaacccaagctccttaacaacccgatccctcgtctccctcaaacaaacaaaatcctcattctcattctccaccgtcgtcgcccgggaccgcgcaatagccccaatagtcatgaaaccctgcaacttcaaccggggacactgctcacgaacatatcgacacagcgccggcgccgcagcaggctcaacacccgccttattctcctcgcccgacgtattaacctgaacatagatacgtagcctcccatcctcgtcgtggttcgtagccgccacctcagcccccctctccccccaccccttatccagcaacttcgccttcttttccgagtccacgctctcgacagcccacagtccgcgcacgtcccgtgccagcgtcacgcacttgttgctctgcaacccgccaatgaagtgccatttgatgcttgcgggcagcagccgcgatttctcgagtagttcttgaaggtagttctcgccgaagtgcacttgcgatcctggcgcttggtgcagtgccaatgcgtcggatgcgggcttgagcttagagacggcgacgaggcggattggtttactggggattggggattggagggccgctgtgctcactcgggcgcgcaccgatgttaggtttgagaggagtgtgctggcgcgtgctggtgttgctgggttcattgttggtggttgcgatggtgtgttggttgtcattgcaggttggtggggttgttgttgatgttgttgatgttgtgttgattctgttgattctgattgttgttgacgtatagatttgttgttagggttttgaagaatttcatataagttcagatagggacttcaatgatgtgttcagtcaattgagttgagatgaatcaaatccaagctagtcaggaatagaaagttagactttcgataagggccttaggcagcaatttcctcggagaatattccgtcgcacgtgactcacctgcgccacatctggccttgcgcctcaccgtctatttcgcttttccgtttgcatctttgaatcgagagatccgtgagatcatctacatcctaagaatgtcaactgacatatggagtcctccgtacaaactctatttctgcagtcatccggtaggcaatcccgatgcgagatcctggcggcaagccagacagacctctgctccaatcacagatatgcatcgtcggaaaagagactgcggagcgccgggtatgggcggatcccctcagttcgtctcaacctgtcaggactgactggctctcggctggtcttgtcgatcagattgtcgccgttgggtttcaaactagtccctcgatgcaggatcttgatctctatttttaattccgtccaacctgttgaatcagaaaatagccgcctgcttgtctttttctagtctttcttctgagactcccatttgcattacccccagtccccaccagagcgccaagtttgctgcctagactacctgtccaagagccaaaatagcggtaccgagttcgatggcgccctcggcgagaatacgacctggtgtcagatgcaacctgccgccgacggatggggtaaggtctaggcaaggtataagcccactaagaatataactataataatacccatcataataagcaaaaaagtttatggtctctttgacgtcagctccaatcaatagccgtggttccattcatagacgcggtcaatgactattcactcatcattacatgaggcctagaagaacttaaagagctaataggctgctcttctttgcctattctttttgcttgctgatcaacgtcgtcaactctccatatcatcactcatttcagctggtctgaataagccttcaaatatctgagcatctcgacatcaccagctacaaagcatactttccgaggttttccgattaggcttactagctagtcagcgacgctcgaaaccattcacacgccatttacacactgggcatttgacatcctcatatccttgccatacaccatcatcaatcttcatatcgcagtcaatctgctttacatattcaactaccaccaagtccatatcgtccatcgtccatcaactgtcaactgcaactgcaaatatccagaacttactgtgggaatcggcaggacgccccgcaacggtcaacagtcaacagtcaactgcaacaaagaagcatccaacaagagcattatgtgtcgccaatacttcacactctacgaatggtgccaatgcgaagaagacgccggcaacagcgtctgtgccgcccatcgtcggaataattgcccgggcatcagcgtcgagaccgtgcacatgcattgcttctgcaactcgcatgccacgcgtggtttcaaatctgagaaggagacccgcaagaaggagaataagaccagccgccgatctcaagattcccttggtgaaaaggattctttcgggcgccgttggtatcagtggtatcaatggcgaggtctgcggtcgcgttagtggcaacatctacatttgacttgtttttctctctcttctctgtctattatttttttaaagctttggtgttggggggttgggatctcgatttagatgagtttacggtcttccattacctggatacgatggtctagatgatctacatgagatccgatttttgcttttcttgaatttgggatattttcgactattctatattagagatgagttctaataaagagcatgaattatgaatgtgcattgttgcaaaagctaataaagacggatctagttattatacaataagaaccaagtagaggcgatcaaagaagatcaataatcaattcctcagttcctcaaatcttcaatagaaatctaagattgttgtctattgtatgtcgttgtatgtcgttgttctatggtctgctgatcgaccgaacccctaccccatgtggcttaacccaaacatgtgaatccccacccttcctttgtttctttgttgcttttgattccctttccctattcatcgaacctcgacctatcatctcttttcattccttgaatgacgagaaacatcgtatattgaccctttgtggcagagtcgaaatctgcaagatggaatacaagcccccctccactgcgggggacccgccattaccaggggacaatggtattgagaacaacaataacgatgaggcgcattgtgaactgatcgattctctgaatcgcctgaccctggcgacagagacaccattgcctttatcacctcgtctttctcctgttccatcccatcctctcccctctagatttgttcaagccgctcgagctgtacctgctattcctctgcagcccagtgaacctgttcaagctgtctcgttacaatcgaatcaacctgtgcaatctgtcccacaaacagctggctctgtttctgttcgagacgaacgacacaggtcaattgcatcgctacagaagcaaaggtctgttgcatctcttcgttcggtctcacaaccgctcaaaccttcatctccaactcctggcccttcacgccgcacatcattcacctctgtggggtcgccagccaccgcagcctcagccgcgatgtcccccacacgccttgtcatcagcccggctccagaagctctagttccgactgctttgtctgtcgctgctgcgcatttctcaaaggagcttgaattacaccggtctggtgatgtcaatactaaaactgctgttattattcatgacgactgctatggccatcgctactcccagcttgaggcgccaaaacgaactatcgacagcattgtcgaaagaccagagcgcattcgcgcctgcgctgtgggcatatctgcagcctatgtccgcctcggctctcgatatgcggaagatctcgctgcaaatccaagttcggacttggacgagattgatgtccctttccaaattatcaagactgatcgcaaggtgcatctgtctgatactgccgttacagatgttcatggaactcaatggatgtcagaattgaaatggatgggggaccttgcagaatcacgtctcatcatggatggaaacgaacttgccagacaacggacggaggcagacgacggcctcgggacaagtggtcctgccctgaatgccaacgacctttacttatgctcagagtctgtgaatgccttccaaggagccctagggggcgtctgcgagggagtggatctcgttttcaagtctggtccgatccagcgcgcattcgtctgcattcgacctcccggtcaccattgttcagctaacttcccttccggcttttgctggatcaacaacgttcatgtcggaatttcccacgcagcaacaactcacggtctgacccacgctgcgatccttgacttcgaccttcaccatggcgatgggtctcaggatattgcatatgaccacaactccaaattactcagcaaaacacaaaaagctgacttggccaaaaccgatgccacgaaattcaaagagtatgaagacgctcctccgtacagcaaaacagctatcggctactatagcttgcatgacgtgaactctttcccttgcgagaatggtgagcgtgacaaagtcatgggtgccagcctctgtgtcgaagcacacaatcagtccatctggaatgttcatctcgaagagtgggccgatctcgatgagttctggaaattgtaccgcacaaaatacaatgcattgctcaccaaagcccgctcattcctacggcaacgtacaatggaactcagtcaagagcggcaagtgaatccgaattccccgctgcccaaggcagctatcttcatctctgccgggtttgatgccagcgagtgggaaggcaacggcatgcaacgccacagcgtgaaggtgccgactgaattctatgccaggttcacggcggatgtaatccgcatgtcgcaagaggaaggcctcggtgtggaggggcgcgtcgtcagcgtcctcgagggcggctacagtgaccgcgcgctgtcctccggtgtgctcagccacctgtcaggtttgagtgagaactcagagttcagaagtgagtggtggtctcagagtaatctgagagaattggatgccatcatggctccaacgcccagcaaagggcgcaagaagagtgctgccacctacctgacagccacgaaatcctttgcggcaaaggtcgttgtccctgggagagaccggaggtccaccggggacctcgatgccaacatccctgccgcccctttgccagaagtgagctgggcggtggccaccggggagctctcgaagctcatcatccccgatggccgccagacccggagctgccgcccggcagagctgaaccgccagcgccgagagcagagcgctcaggacaggggtctcgacctcatcatccccgtcgagaaggggcgccagttgcgcgcgcgcaagcccaaggagtcgggccccgtgcccaccaccccacggcgccaggcccgcaagggtctgaagacccccaaaaccgcggccgccgccacgaccctccctgctgcctcccgcgaggcctccccgtctgttggtgcctcccgtcggaagagcaccagtctgacgcgtgcgggaactccgcaccggggtgtcagccccctggatctccccccggttccacaggttccaacttccgtggggggagtcagggggcgcccccgcataattctcaacatgccggcgcaggagcccgctcgtggccgcaagttgtccggcggtgcggttgaccaccaccgccggggtcgaagctcaaagtcccccaagaaggggaagaagaagcgtgggagcaactccggcgagagttcggctgcttccgccggcagttctcccccagtcgcggccaaggatgccgtgatggagggtgcttaggggggatgatctttgtcttgtcttcttttttcaaatttgatacccagactgacttttgtcgaaacttccgtcatttgtgtaaactttgtagaccgtaacagtagatgacggtttcaaattctcgtctccttatgttcttcgacacggcgtacacaaaggaactggcttcgatccgcgtgaaggaagatcccttggatagcccaaatgctgagcgcgatcaacctgcatccaaccgccactagggtaagaaaagaattcgttgaggtacatacataagctactcgtgaagtaggaggcttttcaatatttgtatgctccttcatcgtacaatggtgtatacagcttatcccttgagtaactgataaaatgcacatctttcatcaaatgggcctgtggtttaggggtataatacccgcttcgcactacaacagtgacttgcggggggtcccgggttcaattcccggcgggtccattcttttttgtttttcttttttttttgtctaccttgcttcgtatattattcttttatccttcttggttatgttcggcttgttttcatgacatatatggttagtactgatcctgttatttgaattgtaacagtatacttgtatgttcttggttgatgttgggtgtcgtagtttgtatgcaaaatgtacatctatatatatttacctatgtatgccctaaaacaccacccgcagcctctggtttaactcgaagaatttcgaaaccaccctcgtctctgtcctcacctttctgtggccacaggatttgtcgtgtcaaaatagctcgaaccatcatatagcacacaaaaaagtacatcaacagcaacggtagtatcgccgcacacccaacaatttcaataggcttgcaggagaatgccttgccaatagcaaaagtggcagtgatcaaggcagtattagggaaaataaatgagaaccaggtcattgagaagaccatgcgtccatgtccaatcgccgaccaatgggccgtgcttgcaataatgaagaaaaagatggctaacctggagaagagttagccgagtacacagaaataaccaaacaatcaaacatacccccaaagccaaaggcacgcaaaattagtaacaatctttagcacatcggcggccagcgccccgtcacccataaaatcggccggaaacgacctcttcgccccagccgccatatttaccagcccggcagccgtaaacccgctcggtcccacagaaacaaacataccaggacggagattttcctttggtagcttctgcgtcatcagccggtatatgaaggccgagtacaccatcaatgaaatcaaaaagccaactccctggatagtcgtaccgccaataataaccggcaatgactgcgacggttctagctttgcactgaggatcccagcatgtgggccaatgatgagcatcgggtacgcagggaaaatccagataggagtcatctgcgcgatggtgaatgtctgcgtcgaccaaaggaggagatagatgcccgccgagaacataacggctagagtggcatcgatccagaagagaatacagactgcgtgaatcagccacggacctgtgttttcgggcccgtactgagatacgttgattaggatcgtgccaaaggatactatagctgcgggtacgaagagtgactccgttgggtgcatgaatgacgccttgaatgtatacggataatgatagaaccggaccagcagaagaccccagatgatgagatataaagcgatattgatcaggaaaaccacgatgccaatggtatccaagcccctgaaccgaaatggaactggttcttattagccatactcaaccgaacaggatgatatcgaccatgcacaccttgatacaagacattagctaggccaccagtagccatagtcaacgtaaaatacgcccacgtaatatgacgaatgcgctccttccagctcagctttccagaaaccgtgtgcttgagcccaaacaggctcagtccgttatactctcggcacgcaccggcttccttatccggatttgttttcacggtagcccgcgacgaggctcgctgtaatgcagcctccagagcagacgaatgagcctcgcaaaccctgccaccgggaatttcctcggcagtccccgggattgagagcgcccgctcagcatcttctatcgttggtgttcggtacccgtcttcgccgggacttcgcatgtgccggggtagatcgggttcggtggccatcactgttaactgcgggccgacccagcgagtgcacacggccgaatacaagcgtggatggtttgaacttccccctcgttcgggggttctattgtgctgcttgcggatgatggcatgggtagtagaggtgatgtcgcaaaaggctaagataccagcatggggaaaaaattatgtacgatctcaggtttctgttgtcgaagcccctttaattaatagcgattgaaaatctaagtagaaaagaatactagacgggtcgttgggatcgacgtgaattaatgtggagaccgatggcaagaatccacgactgctttcgatcggcaccatgaggttgctctgagagaggaacagaatagaccacaagctatgtggattctcgggaatatactcgagatggtgaattcaggttgttgcaggtagacaagtctacttcgcgattcgttaacgtgcaatctacgttattccattttttttttttttttttttttttttctcatttctcnnnnnnnnnnnnnnnnnnnnnnnnnnnnnnnnnnnnnnnnnnnnnnnnnnnnnnnnnnnnnnnnnnnnnnnnnnnnnnnnnnnnnnnnnnnnnnnnnnnnnnnnnnnnnnnnnnnnnnnnnnnnnnnnnnnnnnnnnnnnnnnnnnnnnnnnnnnnnnnnnnnnnnnnnnnnnnnnnnnnnnnnnnnnnnnnnnnnnnnnnncgttaacgggcaatctacgttattccttttttttttttttttttttctttctcatatctccaagctatttagtacggagtactataaagacaaaacaggcaatagggcttagggctcggtgctatccccctgaaccgtggaaccgtggagagccgaggcatttgcttgatctccactcgcctacctgatatgtatactagtacatgccgtagccagctgttttactacataccacgttgtataagtgactttcaaatatagtccttgggcttagtctgtcatacttcaactcaaacacgtcaggaatgacagacactcgcagatcggtgctcatcacggggtaagttgcagactttagacagataccaacaacaacttctgatatatgcagtagatgttctccaggtggcatcggcaacgctcttgcgcgcgagtttaatcgaaatggactacgcgtgctagccactgctcgcgaggcggcgactatttctgatctggcagacatcggcattgaaaccttgagtcttacagttgatgacccggagaacgtgaaatcttgtttcacagaggttgagaagagactcggagacaagggtcttgattatctcgttaacaacgcgtgagtacatgtggattttgtcattttatccgtgaacgatgaggtacatctggctaatctcccacagtggtcggagtatgtaaccccactctgcgactgctagagtcaaccatttataggtactgattgctgcagattataccgttcccgcgatggaagtagagcttgccgaggttcgccaaacgttcgagaccaaccttttcgcggtcattgctatgtgccaggctttcctgcccttgctcatcaaggcgaaaggtactattgtacagattggatccattgccggggtacgcttgaggtatatccatatccggagatctgatcgtactgacattgactagatcatcccatatgtattcggctctgtctacaactcctctaaagcagcactacactcgttcagtgacacgcttcgcgtggagctggagccattcgggttagataccacaagccccaagatctatgtcgtgttttctaaccaggatcaacagtgtccacgtcacaacgatcgtaaccggcggtgttcaatcgcgtattgcgcggaccgaccgatctctacggccgaattccttatattcccccatcgagaccgagtatattgcccgtgtgaagcatagccagcacaatgctatgccgaatgacgcctatgctcgcagtgttgtttctcaagtgttgtatggctcagctccatggcgctggttgtggccatgggctcgtggtcgtaaggcctggatctgggaggggcatgctagctggttgatttggatgttgtcgggtggctgggcttggtcgggactgtttggtcgggccatgactaaaatgttcaaactatggaagatcaaaaatgcctcggctaaatgaaggggggaggagagaggtgtagatgtagtcaataagatatagtagacaaacgcaaaagatataacgcatatagatcatacaagtaaataaacacccgtttacatccaagtaccgactttattagccatgttccgttatattcgcgtaccccatgctgagtcaggccaggaacgatcgctggttggccacggcacccgattctagcgtaacacaaggttacctaccccgagtgaaaaagaaagctgttctcccggtcctttaccatctaaacgggctttatatctccgcccttccacattttccctctcataattcatcatgtttaagcttgctcgcggtagacccgttgcggcggctttcaaggctgcaacagtgagttatatctgagatcgggcgctcgtttgatgtgttaattaagctgactttgttgaacaatagcaaccctccattcagagcagaatcgctttgcagaagcgaaacctttccatccacgagtaccgttccgcaagtctcctcaagactgtacgtccacctgcgtttcaccctttggtcgcctaagaaggaacccaggatcactgatcaacaatctagtacggtgtcggtgtccccaggggtgaggtcgccaacactcccgaagaggccgaggctattgccaagtctatcggtaagaataatataccactttcccccgttgaacgcgctcgctgaaaattacaatccaggtggtggtgatcttgttatcaaagcccaggttctcgccggtggccgtggtaagggccaattcgacaatggtctcaagggtggtgtccgtgtgatctactcgtgagtcgaacaaatctaaggacgggttgtcaacaatgaagctgataaatatctttacagtcccaccgaggccaagatgtttgctggtcaaatgatcggtcacaagctcgttaccaagcagactggcgctggcggccgtatctgtaactcggtctacatttgcgagcgcaagttcgcccgccgtgaattctacgttgctgtcctccttgaccgtactactcgtggccccgtcatcgtctcatcctcccagggtggtatggatatcgaagctgtcgccaaggagagccccgatgccatcacaagcacccccattgatatccacgtcggtgtgactgacgagatcgctcgcaccatcgccaccgatcttggtttctccgagcagtgcatcgaggatgcaaagaacactatccagaacctctacaagtgcttcatggaacgcgatgttacccagctcgagatcaaccctctgtctgagacttccgatcaccaggttttggccatggatgccaagcttggattcgacgacaatgccgagttccgtcagaaggaggttttctcgtggcgcgatgtttcccaggaggatgccgatgaggtcaaggccgctgagtacgttgccttacccagttatagcaaaaacaaaacggcgcgaaacaacattgactgactttcatctttttccaggcacggtcttaacttcatcaagctcgatggtgatatcggctgccttggtaagaatcctgttgatacgtcaaaatatcacaacgctaattctcgcttctagtcaacggtgccggtctcgctatggccaccatggatatcatcaagcttaacggcggtacccctgctaacttcctcgatgttggcggtggtgccacccccgctgccattaagagcgccttcgagctgatcaccagtgaccctaaagtgtctgccgtcttcgttaacatcttcggtggtatcgttcgctgcgacgccatcgcccaggggttgatcaacgtcgtgcaggagatgaacattaccacccccatcatcgcccgtttgcaaggtaccaacatggagaaggcccacgagctggtatgatgacagtccccattctcccttttttcgctatggagtcaactaaccacagcccctgctttctagatcaacgagtccggccttaagatcttctccatcgaggacctccagaacgccgctgagaaatccgtccagttctccaaggtcgtcaagatggcccgtgagatcgacgtcggtgttgagttcaccctcggcatctaaagggcgtttaaccttttgtttataatgatagagagggtagggagcattttcatttgcctttttcctgggcctagcgaaccgagccgaaccaccgcagtgacatcttagagtgatctttgtaatgcttttgcgcctgttcctgtgtcatttattttcttgttgtcactgtattcttgagtgtttctatgacttagatcagttcctaatcgggatatgtgagagatgatatattgagctctcattgtttagtgtaaagtatccctttctataaagttcatctatgtagggtagatggctgcttgtccgagtgaggatgacctggactcggccatatattcttcgagcttctttgaaggcttgacagaagctacgtggggaatgataacattctataatgtctccatgatggggcttaaaaaaagaaaaaggctgcgagagcctcccgtactgaagtccacgggtcgcccaccaccttacttcaacctcatctcaaaccgtcccccccttccatcccatcccatccaacaatatccctttgaaagtttctttctttctctcaatctttcgttcgcctcgatctaacatggcctcacccacccattccattctcgagggctttgttgctctccgagacaggtcaagccgccgagaagtgtatgtcccacgtccaaagcccatagtcggatctgactgctgataaaaataggctcaatgcgattcttgataccctagattcatatgaaatacgagaggtgaaaagtcgactcgagccggtgacattccaacttgatttgctaggtaagctgcctattgaactggtggctatgttggtagagtacttggacctagcagatcttgttatccttcaaagagtatgtcagcatctgttcggatattcgtgaccaacatgttgacatttcaaaggtctccaaacgatggcgtgaattgctctcttcaaccatcgtcttcaccactgcagtcagacaccacatgggagaaaacatcatcaagtccggttctacccctatcggttttggcgcgctggtaaaaaaaagaattcgcgcggaaaggggaattcctgctgttgtggccacaattcctaataacttgtgttgcaatgtagcgaacatcatggagagagaggccctaagctgttttaatggagtatgcgcgtggattgaaaaatccacagatcaaactactatattcatggtgaacctatcaaccggcaagaacagaatcctcacaacagcgaatcgagagagatttatttatgtccaggtctcggacaccttagtctcagcaatttctgttcgggggtatgtagccagaacaggaatttcactttgctgaatgcacctctgactggacacgataggtattgtcatgtctggaacatatccgaagaacagtacaagtcatttcgcattccttcgctgaaatttggtcattacatctccatcggatccaaggtcatgctgggctactcggattccgtggtccacttctgttttgactctggaatcgcccgttccatcaaaatcgggccgttcgttcttttgttgtcagtacatccggaggaagacggattctccgttgtttgcgtccgcagaaaaaatggcgacaatactcaagcatgggcagatggccacttgtattgggaagagcatcatttgcagactcagaagttctctgtccatgataataggtttatctgcacgtgggagcaatatcgagagcttcctttcagacaagacgaactgtggatgtttcgatgcaaaccagaagatagctggccaccatggagagtgtgcccgcgccctggtcaaagctctactttgctggattacgatatgaccgaagcctttatggatcgttctcctaattatctagaacacgaggatgaatatggctcgctttcgctttcactcgaggcggatgatcggattactgtgcatttccgctgcgaaaatattcaagagctggaattcaattattcttacactaatctagactatgcagcccggggcccggggttgatttattgtttagacatgatgttaggggatttgaaaattggctgtgaatttccagagctgtggcatgcccgcgatgctgaagcgtattcatccttatcctttcgcagaataccttttgcagctaaccaggcacccaccgcgatttggggggatggagactttgctctattccttgtggatgacaaaatctggatctggtgttttgatgaggcatggatcccttctggcatccctaacatgaagattgaatttcgcgatttgactacgcgtacaagaaacaagaaatgactataccaactagtcagctataacccctgtcaaatccacctgggcgctagcggatgattgcagtcaatacaagctctttgttaagcaatactgtatgaataaatatgtagataccccgatgatgattagaccagggccttatatgcatgtgagtttaaaaaaggcagattgtatcacagaaaagtgtatcattattagggggtaatttgagatataataatagtacaatagtacggagcactatggaggtagaactacggagtatgtctagccagtttagctgtagtcaggcatgaaccctttatcatcaccgaatcccagttaaatgcctcaaagcctctttatcctttgatatactccgtatagcgtgttatattagtgagaattaggtagaatccaggccaatagggctataaaagatatggagtagaggttagacaattaaagtaatagccctgtcacccctttttcccagataatatgctaatatatccaattggactctttcttttccttcatccctgtttaaactcataacttcctcattttttctgcagaccggactgtcaacgcatttccggcccccttccccgcagagccttttcctcaaccttccagacaacttcgagactttcttttttttttccctcaatattttttgttgaaaacaacccaatttctgcgcgatgacagaagtgttgattattggttgatctcccacgttcgttcggcacgagcataaacggtccatcgcgtccgaattccacccctcacgatcccgtcgcatccaccatcgatcttgtgctatatatacccacacccctccgacatgagtcgtcttgccgaccccccttctactaggatttcatttgccggggtatcagacgcccccggcaggacacgaaacatacctgtactttcgtcgtctggtcagcattcgatggatatcacccctccgcccacgggcgcgcatggctctgacgaccgaatgaccggaatcaccaatggcgctgaagctggaaacaatcttttgactgctccaaatgcggctatcggcgctgcggccgcagctcagcagccaaaagtcgtccagactgctttcattcacaagctctacaagtatgccttttggtcttcctgagtcttttgtcttcatcggcttacctttttgggaaacagtatgctagaagaccccagcatccagcatctcatctcttggtccggtacaaatgatagcttcgtcatgtcgccaacgtcggaattctccaaagtcttagcgtgcgtgctatcctctctgccaatgaactcgtctctgaccctcgcagatcatacttcaagcataccaatatctcctcgttcgttcggcagctgaatatgtatgggtttcacaaaggtgggtgtttcgcatgcgagctttgactgggcgatttctgaccatttttgactctgctagtgagcgacgtctttcacaccgggtccccggattctgcgctctgggaatttaaacatggcaatgggaacttcaaaagaggcgatctagctggtctacgagagatcaagcgccgtgcttcgagacacgctttgatccaccgtgattcattccctggccacaaggctcctgtttcgcagcccggaactcccgccgaacccgtacatgatgcgaccgaagctagatttctaaatatcgagcaaaccttctacgatctgcgtaatcgtatggctcgggccgaagaaggcaatatcacactgaactcgagatgtcatgctatgaccgaaagcctgacaaagtgctaccaggtatgtccgccgtctatgttattgcagggtctagtgctaacctgattttagtggacacattctatttcacggtttcttcaagctgttgtgcccgatagggaaagccctctacatcgcgatggtatgtcaatattgccgcttccctcatggtgacacccactgacactcgccagtctcgagcatgcaaagagaagttgagaaacatatcgaaatcatgcgcgccatggaaaccccccacgagaccctcatgcctccgcggcaacagtacttcgccaacatgactgaagccggtccacctttgtccccgcgccaaatgccccaggacgatgcccgtcgacagtccatgatggaccatacacctagacacaccaacatgatccgaccgcccgtccctccccatctctcagtatccccccgccgctacggctcgattggcggcgccaattctgcctcagcatacgctcgcctacaacctcctgttgcgccgcccgcacagcaaccgatgcctcatcctctctccgtatcaacgtccccaggaccaaacttgacccgccgtcacacgtctgcggatatccgacagcacggctggtccccctcggctggctcaccctacccccctggcaaccccccaaacggcccttggccttcatcaccagggcaccgaaccccggtctctagtgaccagcaagtccgtgatgtcctcgcccaatacgaaatgggcgccccccgccgccttcgagaacaatcccgccatgccactccaccaactgccgaaccttcaccgtccatgctcggtgtcgataacggctggacacttggtggttcaagattccctcacggctcttccttgcccgcaacccgtcgctcgagcatggcgagcaatgtgcattcattgctcaatcctgcagatactgccgaaagacccgacgaggaccagcaggcgatgtcagaggaccgtaagcggaagcggttggaatgaatcctacgtttttggaagattcccagcatccaccattcactaatgctggcactaccttcttctccaatcaagtccccataccaccgacaagccatgccactcccctcttcttcccctgctcttttgatctgcatatgtactattcaccagagcaaaagggcacccatttccaggcatctggagaatgtccccagctctgacctcatttttttaattccgcctgtagatgtcccatttcccccatttcttctccacctttcatcttttctatttttggatatttaattctggcgaaggcacgccaatcccggcccttggcctaacggcctacggctctccgggtctccatacttcgttcacacacagcatatcatatatacccttgggttgggcggagcaaaaaaaacatttgaatcttgtggcacctagagcaagagactggaattgaattgtattttatatttgcagtttgattatatcaattagaatgatgttttttttctgcactgtttgatcttgctattttgttggagtggcacgtggcacagcatggcacagcatggcactcagccgagtatgtatgcagtcttccttggtcgtgtctagccaagggacactgcgctgtagtctctgccgctggcagagtgaggcctcagcgggcgatccggctgtggcggcatgggttcaaccccaagcccctgaatcaacggcccaatcgccgtgtctggcgcatccgaagcgacgaagatcaaagcctaatccatcaaagaggacccagagccaggtacggagtagagctcgcgcaaagctcgtgtgcgtggtaacatagaatcgaaccgatcaaccgcaaatcttcatctcttcttcctcttcttcgcacgctcagccaaaagctcatcaagataactcgtagccttcttcctccccttcgagcgcgcaggagcaggcacaacctcaccctcaccctcctcgccacctttatctctggcctcagcagccgcagccgcaggatgcacaccacgacctgctccagccccacctttcctcttattcttctgcctagcaagcatagccgagcgaccgtcctcttcatcatactcgtcctcgacgtcggctttcgacacactagccgaagcagacgcagccgcggccgtagaagcagcattcgccgccttctgctcggcagcggccttcataacgcgatcgtagttcttgccgaggagttgtttacgtagtttatcgtttgagtccagctctgtgcgattccagcttccgtctgctgctttttgtgggaggggggctccgacaccgaggctgtgagttcgttgtggttagttcgtgcattgtagggtatatttggtggaattggagaatggtggtaaggtatatgcctagattgtaggtggagaggtggaggagcactcacgtctctggcactgcagtgaagatttcatcttcttctcgttggagctcttcgtcggtcttggggtttgctagctcttctggtgtctgttgcggtagccatgaggctacgagccgttgactgcgcgatagagcaatattggcccggttaaggatcacatcagactcgcttttagagagcgacatattggtttctttgcgctcaatgtcgggttattggcggattcgaatcggtcttttgtggttgggatctgcgatgcctttttttctgccgatatagcggtggcggtgagcatgatctatagactgacctgcatatgtaagtaactatacgtaccggattctccctggcgtgtggagctttcctatttgatctgccgccactttcatgagggtgctcagactcaggctcactgagtagatgtcaccacggactcagatcagtgatcatgcttagttcagtcacgtgtagaatgactgttgcagcctaccgcagactatacccagaagggattagcccccacagggtcgtttatactgtgatagttagttcgttgatagcattgctactgccctcaatttgtgaaatgctaccgacacgcgaaaatcgctaccgtcacgttgcccgccatactactttaggtaagtctgccatctctttatcttccgcttaagtcggcttctcgggagaaacgacatgacttcggggagcatgccactgagtctcagggagaaagaagaaaactgataacattccaacgacggtaaatggcagatgaatgatgaacaaatatctccagccaaggctctcggctattacgccacccaggatcgagactagagatataatgcaggtccatgtcatcactaacagaccagtccggagagatcgctggtgaacgaaacaccttttattctcccagtcagcgttgtaagacgtaggcaggaggttaaattgacacacatatctcccatgactgcaacagtaaaactcccaaagaccgcggagctaaacccttggataattcgccctgctaatataacattgtagttatcgctggttgtgcaacatacaagggttccaatgaatcccatgatggtagcgaagataaattgtggccgtttgccgtatttatgtgccagagcagatccaattggtctaatcatatattagctcaacgcccgtatcaagacatatatgagacatacccgtaacaagcacacgcaagcaattgatatgcggtaagcattgtgatatcttcaatagatcgctgcacagcgtgcgacatcaagaccatagatggagcaatcaggggcggcggaatggaagagaaaataatcgaattggcgaataagacacaatatatcaaattcttcctccatcgtggctaattctatgcggggtttgagattcctcgctccattacatcacagggtaccacctaccagaggatcgtttgggctgttggagggctggggaattaagacaacgcttgcatgctactcttaggatattttcttcgttttgccggttatcccttctgtaattacctttccagtgccaaactttgtctgggaggagacatgtgtggatgattcatcgaatagtagaaacgttccaggtgcatggcgctcattcagttgaatgatacccaaagccattttgtatgatatccgatagagaggctcaagttatatttgatgtaaaggtttgattcacagattagaagattagaacctttttttcgcccctgcctctctcaggggacgctcttttatatcctcacgcccccatcaaagttttcctggggaaactatggcggggaacttcggcgtctgcccagatattgagcttgaatttatctcatattactagtaccaaaacagatcatgaaccactgtcagtcaaagtcggatctatacaccacataaggttaatgccaagcacacgaggaaatagtcgagacccactatataacttcacctcccgcgaagccctggactttcctattcaggtagtgcgaataacctggggattgtgacttgttgtcaccattgtgccggagataggcatacctcgcagatattcaaggtgttaccttgggacaaaacaacaaccggtgccctccagggctgcctacctaggtacccgtggacgaatggagacctcactaaccgggatggaccctgtaggagtagatcagcgccggagtgttgtgaagggatattgatcaagttgactccggtccggttggttgataaaagttgggtgttgcatccaaaacatttgtgggcttaacaggttggagctggagaaatttggaaggttatccatggatgttattgttccacgattaacacctgttaacacccaagacattaggcaataatccgtaatacttctttatcacctccacgcccttcttttctctctgctaagcacttgaatttaacaacccgcttgtttatcaacttcaccagagcgttttcatttcttctgaatcttgaagctactcaacctttcgtctcctttcccttgtcgaaatgtctcgctctaggggcttcgtcgtaacgatcccctcgataaacttcgatcacctgggcggcactgaaatcaaactcgaccagccttccctctcgccccctcgtacgttcgttattggcgagaaaatatccgaagattaccaaacgatgacccaggaggaatatgagcgacaaccggggcctccgtttgccgtcattaagttctcttgtcacagccttctagaccctactcagcagggcttcatgcggatctatatgcagatccctcttgatggtaccctttctagcgttccagaagtccgagcccagcaggctgtaagccagtgcacccacacggagcttaaagcgcttgtatctcttgatcgcgaaaactgcatggcagtaccgaaattgcttggctatggggaagggttgcaaggtgtcgaagaatttgtacctggtggttacatcaactacgttgcgtgggaacgggtgcctggtgagcccgttgactactatactttctggaaacgcgactttgaataccgccagtgactacgttccgcctttcgtactgcctatgagtaagatcataacccctacatgtccaaaacttcgagaactatctatactaatacaacgaagagaactcagtaggtgttcttggcaacctggacttacccctccgagcaagattatctacgatgatgtgaccaaggttatgtaggtagttccgacattctattcaactaaccaatctatgaatgccgatggtgatgagttaatcacttttaggcacatttccggattccgaggagcctatccaatggacactgagccgttctaagacgagacctacgtgttatggggattggaaaagccatctgacaggctggattggtatactgatagctcggactggacctggtgaccaatgtggatctccgtacatcgcttctttgacagtcgaatggcctttcgcatatgggattgtattcttgagttgttcatgatacccagctaccctagtatgcatgtatctgtcgctgaactagtgctttcaataagacaattgtagtgcctttccgctaaagatagcccttgatactatgggagacttacaacaccttagaatcattcagcataaatgatcagatgaaatttccgaagctactctttgacactctttgacaacgtaatatcgtcgtcctgtaactcgcaagttgcaagtttccctcagaaatccaatctgatatcagtattcaacatgggtccttcatgcataatgccccgacaaagctgtagcctcgatgctatcagcttcattaggaataaaatctcggctttagtttaatcatcagctttggcttgttccatagcacataacattcttgatccacccagtccttttcaggctggtccaattccatatcgaagttgaagaccatgcgagcaagaatgatacgcatttcgacatatgccagactagacatatatatgagcaaaaagcgaatacagtagagacactaaaaacttacttgcgtccaatgcagttcctaggaccgaaactgaacggttgcattgcaattttactgtcattcgagaaacgagggtcgtccaaatgccgctctgggataaactgctctgcatcggcaaagttggcaggggagtgactggcagcgagatgggagacggaaacaacggtctataaaaggcgtaagaggtgctgtatgctgtatggctttttaagcaagctttgtacttaccccgcctggaacccagttcccagcaatcatatcaccctgggcatcaacaatacgaggtaatccaactgcaacgggtggatacactcgaagagtctcagtgaggacggccacacaatactctagtttattgcaggattccaaggtgatgtcttcttcttttgcaaatgttgatctgatctcatcttgaagctttgccagaacgcgtggatttctcagcagcagatacgtcaccccagagagcacagttgcagtggtctcggagccggcgatgatcaacgtactgccattggtgatcatttctgggatgctgaatcctttctcggtatttcgatacctcaaaatgttgccaaagaaatcaggtctctcattagacttggctatgcgactctggactttttcctcggtcaaggctaggtgtgtattcctctgcgagaggacatacttaggagtgatgtatgggaggatgtatttcgatcccgggaagcgtcgagacacatttgcgtaggcaccatacttgagcgaactgaagataatggatacccattggtggtaatccgaattcttgagacagtcgaaaggctcaccgaaagccaggtctccaataatatcaaaggttgtgaagttataccaggccaccatgtccacggtatttgtgccactatcgatattctcatgcaagcgctgcatcaaaagatcaacatagcctttaattataggttcctggccgcgcagtgagctatcggagaatgcgtgcgacaatagacgtcgaaagcgggaatggtcggcgtcattggagatgatgatactgggagcttctccagcggttggtgcatagaatcgatcatctttagacttctgaccatggccaacacgtgtgccatagattgacttccaggccgcgccgtctatgaaagaaagttcatcgggggcaatgcgaactacatcgccgtactgttgatgcaatgctttcatcttttgtgggaaccggccacctaggatcatgcgaatataaggcagacgtgtagctgccatagatttaggtccaggatatttggacaaagggtggaagtagacattataggccaggagaccgatgaggtaaagtgggatctatttagaagtaagcccttagttagccgaattccatcgaaacaacctgaaagaccagcgtatacttaccaacgtcaggcttagcttcagcaaagcgggagctatatttgagaagtcttgcatgtttaaaagtgccgaaagaccaggaataaccgctatgattagggctgtcaagcataagattcgagaatattcacaacatccacgacatttcgagagtacttatactcctcctttcctccttgccactctcacatgtgtgacataaaaacttaatgcacaaaatctctgcattatgatgatctatgaactgagaccccgcactctgcatagcacgattctagcccaacaagaggcctgggaatatgtacatggcccagcttggtttcaatctaaatagatattaggagagacttgttgtcctttgaatccgagaatctcttcccacccatcccttataaataaattaggactgggtattcacctagatgctttcaacacacagtccagacattttgaataaggatcgaatgttgaagtctcatataatagacacaccgtcattggagaagctagtgttccaagctaatgtagccaagctcatgaaaaccttccctgggttggtcgcggcccatgaataaatcttgatgtaatgcccatacaaagggtacaaaatccgtgacatccatttcactcagcccataaataagactaatatgtaatttaagcacagttaggtcgttctatcactaatgtattctaagcaaccttgaaattagtatcgaagtgcgagaggcaccttaaaaataccatatatagagattgcatagcacctcaaagtagtatgcttaatacttatcaatattgataccaaaatacacaaagtctatttgcatatgtatacaagagctatattttttatgaatctcttatcctttgtatgagcatgacataaaagatttatgcttgtactagcaatccatgtatgtatcttttttatgccgagagtaaatataattctgcgcaggaaatgcagcataaaggccgtgtttactgggcaatccgaagagccacagactacgatatccacattgaacaataggctatgttaatcggagaccttctcaaatggccaaatttactctgagaaagctgggctaaccagagaccaaaagtcttgttactatcatgataattacaaatatgtgtgtatgcgttgtagtacatgtcgtcgctatgtgtgccctctgcatccatgtggcaatccatacattttcagtgggagacaatcatttgcacggaggacatcttgcagcatttctaaatcggtttgaggaaacatttgcgagccccaagaaatgaattatattcctctgtggagtcgaagcttgtccttccctggtgaggaagcatcttaaaaaggcagtgagaaaggcctgcaggaattccaaggttagcttatgaattgaatactcgaaataatataatggcctcattcaagactctgtgtgttttgaatcaagtccttagaatcttcattttctgtgcttttagttggattttgactcacgaatccaagataatgccatcctcctgtttcagctgaccatggtttcatatcaggtaataactgactgtcattaagtatgatgtgggtgaattgctctaagctggggggtccatttaacaaaattctcagtaaagcctgttcacagcaatacatgatatttccattaggagaaggaggagtgtacaggcgcagaacgcaaaaagtagtatgatccgagtctttcatgagctacttgtcgtgatgacattttactgaacacagagcccgacaagacactctggtagaagcatcaatcgcattctccaagataattcgaggaacctgtgcggtattaccggcgtcacactctccatcaataatgaatgctgcaggtattgctgttaatgataccgaaatttgcttggtgaaacgtctcacgggcaattcaagtttttccctttcgaattatcaaaatactaatgatcctcagggtcatataaggattacactaattatatcaatgtctatactacaatagtctgaataatctcttcaacaaggtataaaaacgttatggcatcatttatgtacagtctatctctatacctgatactgtgtctgatctagacacagatccccattttgttccaatgtagtatgacacggggtataaaaaaccgagaagcaaccaaaatcagccgcaagggctcacactgtagctagaccctcatgttgacgtttcacccgcaaccttttctcggttttcatgaactcccgaataccaacagggatattggaaaacaggtcatcgtgttcagacggcagtgtccagtttgtttcgctgccaccgccatcatcatccatgcttccactggctgcgcggacttccgcccgaggtgcccagcgcatgtcccgtgttcctttctcaggcccacctttagctttagccattgtgatcctggatgcccagtcttccatctcatcccggaagtcatcccagacacagtgaacgcagccactcatgcagcagttgtccggttcctcgggttggggaggaatggggactccgtttatagttttccacattgactctggaggagcttcaccaggattgtagcgcgaggttcggcctggaccggtgagagggctgccaaaaacgatcgccattctttcttggggcgattgcggtgcgacagtagatgccggcgtcggtttggcctcgggccgagtgggtgtcgggcgtgatgtcggtgcaccaccagcgtatggcgagttcgatttcaatatcaatgaatagtatcctgacagagggtaggcctgaagaggctctgcagtttcctctagggaagctggggtattgggttggtcggattggctgtgtccgttcatgcgccggggagtcggaaccagcacatattgtcgatatgaagcgaatgaaggatccgttccaacagggaaagagcggatttgagacacggagctccgcagccagtgtcttgtacccgtcaagagacactccatagtgtgagttggagaaagacaagaatgttcgtgcattgacgaagggaaattaggtcataatgcaaacactgcaaacaattcacgattgtttatctttctgaggtcatcatctgggccagacgaacaccccacgcagcaatggattccttagcaaaaaagcgaaaaaccaacgagactacaggcattcctgtagcgccagagattcctcaaaatgaagcccatcggtcgagacggccctccttccagtctccaacgagggccagtcttgcacgatcacatcccgatttattagagcgcgcaattagcagatctcctgtccgacgaccagcaagcagagacagtgggcaacaagatcctcgaaaatttggattacgcgatcgcaaagcactccgaccttcgctcaatgcctccgcaagtcccctcactcgacctcgaggctctgaagcgcccgaaagttcccccagcaggcgctcaagtggcgttcaagcgttctcaaaacccccgcgcaggatttcaaggaggattttcccaggagatttagtatttggatccccaatgccacagccaaagaatcccgaatcaaatacccccgagcgtcaattggcattggaattgggtagcgccacaagagaagcatatatggatatggatccggactccggtttcatggatgaagatatcctcgaacccgatcttccccccacgcccacacaattaggtctagaaaaggccccagatcgacccaggggaatgttgagtagcagccccagtaggcgacaggagaaacgagcgaaacgaagaactatcaatgctttgtacgaaagcccacttaaggcagtgaacttccaatcccctccgctggaggacctggagacagcttcagacttgggtgaagtttcagcagctgttcgcgagaaacgcaattcgcgcgagaagagcgctgcagatctgcgacggctgagaagcgaagttgaaaaactggaacaatgggcacacaaaatcgagtctaatcctgactcggacggcgacacgagaggactcgacgaatttctgtaggttccacaagcaaactcggcttggatactgctgacaatctctaggtctttactcacatccgaagaggcgaatcgtacaagtctcccagtaccaaaaacagcccctaaatcggtatcatccctcctcgccactctactcccgttctccgccaatatccctcgcccaaaacggaaattatcatcgctgccgacgaatccatttgccctgcaagaagcctctcaatcactgccatacctaacagccttcgcgcccttgaccctcaaaacccgtacaactcggtcatcacgtagggaggagctgttcgaaacacacacactgaccttttctcctccatctccgttcccagcaagtctatatcatgtgactgttgtctatgagacgaacctcgagacccagtctttgatttctctgtcagtgcctgctggcagtgacagcaagaaaagaaaagtccccgaagctctccgtcgatggatcaatactcgcttagagaaccctcttttgaaacttgacgtggcaactctatgctggggaataaaccgttactgggaatctgcaattactcgcgctcgtttgtgggcacacattgaccatgagtatggccctcgggtctctcagggtagaaaggatactgcctcggaaagcaagaacggcctcatcagactttctgaactgcgacgactggtcccgcatttagatcggagcgcgatggtcatcagccctaaatcccctgactccagtctccgagtgcttttgtcaaatactttggtgttggatgaatggaccggagagcctcagctgcggcctgagattagcgtgtcgatccccggggtagataagaagatcgatcaggaggccaagaagcttttccatgcgttgctacgtgaggatggcgctttggtcacgcgaggtatcgagggtggtatacatgttgatgcggtggtaagggcgactgaaggtgctcttggtgctttgttcggtggtctttgatttttttttggtattccggtgcgattgtcagcgtcaggtgttggagtgatctcaagatacccgagcagagctcacgtgttcctctaaagtatgagataatgaattttctgtcttataaacgagctgaattagctatgtaatcagtcactgattgtattgcggcacgttcatagatgcagtaattgattgacatgctataattcccatccgaataggcatctaggaaacttaaatcgatatcgaagctacaaagtatatagtgaaatcaactacaagggttcaatgttcttctcgccggaagctcaagatacaacgcctagacaaccacaaaattatgagatgtacaggcacaaagccgagattgagagaattgggcagttttgaatttcgagagatcttccgagttctttcttttagagacaaaaaggagtaaaagttggggagggagagagggaatcaaggaagaggcgtaacgccatgccacagtacactaatccccgattcgaaaaccgacccgatcatcatcatcagcacgaggagggaattaacacatttatttcttggcattggcctcatcatcagccttggtcttggcacgcttctcgcgcatacccttgtagcgggcctcagcgcgggcgtcacggagacgacggtaggcagcctcctcgcccttggggagggagtcgcgcttgacctcggtaacggcctcagcagcggtggggttggtgatggggaaggtggcctcaacacgggtggcgatgccgtcacgcttgccctcagcgacggtggccttgacggccttgacgtcctcagcggaggagtcaagcttcttgaactgaccgctcttgcgggggaagaggatcaggcgagccttgtagtcctggagacgggcgacattggcaaccagagactccttagagtagttggtgcggcggtggtcaacggagataccgacggtgggagcaagcttcttggggataccagcttcctataaagcgcaaaaagaaacatgagtcagcaagttgtttctccgtaacacctccactttcgacgcggctcattttaccttcagctcagcgagggtgaaaccacgaccggcacggacacggcggttgtacttgatggtggggcatcggacaacgggacgcagcttgtcgaccggacggggagcaacagcagccgccttagcgatgcgggcctcacgacgacggtgcttccggccgggctgtgcgattcatgttagtcggccaaattcatatcctgcaaagagaaaaatttcctcgattccaagtcgcttgcgatatcgttcggaataagagaattctctggtcggggggagggatgttggatagtcgtacctggtcgaagtgcacacggacacgacgctgccagtccttgtggaagtctattcaagaattcgttaatcactgttccttcaacgtctggtctccccaagcctctctgtccgtttgaagcgacacatagagttgcaaaagcgacgggtcactcacggttcttctgaatctggttgttgtgcttgatcgcctatatatcccacacacaatcggtcagtcaaccatttctttcgttcttttcgaggcgtatttcaatccatcgatttctctcaatcgcacaagtcgaatccttcattgtatctctcaagcagggatagggaacgcaccatggtgacggatggggatcgagccgggtggtggtcgtcgagggttgctggtcaaatcctcttcacggcagaaaatgaagttcccatttttcgtgtggccgcccgctgactggcacaccgcctcgcttagcgagccctaaccaagccgaattcggtaatctgccagagctattttttattttttatttttcatttctatgcttgtctgcgacgatatcaagcatggaattattcaatgagatcatgcttgaacttcagtatattgtttcaatgttgtaattcgattttggtctctgaagactctatacctattgtacaatggttgtaccgtcccaaattcatatccccaaattcccgtctatagctaccctaagccataattcccataccgaaaagacaattgaataacgccacatgtgaagggccatggatcactgtcgcatggccacccaaattcccccccccccccccaaaaaaaaaaaaaaaaaaacagttcgctacttggaaacaccatatttggcatgtcttcatcattcgtgaggttcccataatcgtaacaagcaaagcaacgctaggtcatgaatcatatcaaagtcagtggcacgagttcttcaagtagccacgggatatggactcaagcattgatgcccaggccaataccattcgtagtcctggacttcttcgtggcagcaacgttcgcgtcactgcctgccttgcgcttgccagcacgagatcgatccacaccaggtttctgtacctgtccaaacaactttgtctggagcagtgtgctgctcttggggacagtggagcgcatgtgctgcggggaggtccgagcttcctctgcagcctcggaggctgaaagggatacggtgctgtcgctatcatagtgatcctctcttgggtgcccagctggagtgatgtactggttcttcgagtggttcggggtgacggggacagaggttgcagagtgactaccataagcgtgcgtctggttggtgagtttatcggcatagagaagagcggcgagaccatctgcgtgttcaccatgacagagattgtgtatatcattctgagtgcccggtgacatgctgccgtagttgaagatctgagaaaagtgcttgcgattgtcaccaatgcggcgcttcagcataaggttctgctcctcgaggtctatagaccgactggtagcttcatcaatggcacgcttcgcttttcgaagtcttcggtctagaacggtattgagttcttctaattcctgcgagcgttgaacagccgaaagataatcaaagtttaaggcagactgggactggttgggcgtaatgggatctgcagggtgcgagcgactgcggtactcggcgctctgaataatttcgacttcgcgcttggcgagctgatgctccacctcggcacgcttgacagcttcattgcttgcgaaagagaccaagctgttctgcagtttgaagtgcagcgcagacatgcgcgactctcgggctacggttaaaagttccttggcaatagtgcgcagttgtgtttcgctggcgttgtcgatatcctccatggtgggcaggttctcagaggccccgtaggcatcgcacaacgacttatccagatcagtgggcttcaccaacaaagggctcaaggagcgcgagtgtgagcgagaacgaagcggggcccctgggatctgagatgagggtggaggggtcatatcggatgacgacaatggtggaggtgagaggaacttcttatccgactgggacgatgggcgcttagccatgacgctgagctccggcgatggggacaaagtggcccggtgggctggagtcgagggcacgatctccgcaggtgcacccagggaactttgggagttgaagttttgagacatgatggacgtgtggttataagtgagctgacacaatagtatatcacttcgataagaccacgagggtttagccgtggggagacgggtcctcacactaatttcttatcagcctctttatcgtagaacagatcatggacgaacaaaggaattatctacataccgaagacagataactatcagtcaggacttgggttcggtcgatcacacagatgctcagaccaggtatgttgtctcaggaaccaacagaagatgggggatctgggggtggagcaaggggaatttcaatttcgagctaagacgacaatgactcagagaacttgaagaagaatgaaagaagggagaataatggagttgagtgagaccttaagaggaagaggttaactccagcgttattgggaggggctgggaggctgggaacgggagagtctcaaggtacccgctttgggttagtccatctcccagccccgatcaattatctaagaatataggccaatcagaggtgagtatacagttcggccaagcctatttaggttagattggcgatcacgggacgctcagggcaagtaaacacccgcgaccgggcaagcgctgggggttgggtaggcaaccgataagcatcaagatctgtacggagtatatgtatatatgatatcatggagatgttttgatcttgatgctttgtctatcggaggcttgagatgttctgggagaaatttcgggttcttgcataacattagaagataaaacaacccaagtattacaactcttcgaaccgatgaaacttgagattgcatataacaatcaattacaccgtagctagttagaagaaagcaccatgttatgtcagagaaatcagacaagaagacgcaagggcatctcttagcagttggtaccagctcttcggtggcaaaagtaagggtctggtctttgtaatctctactaatatctgctaccaaatgaatattgagtatcggaagagcattatgcccaaaatataattgtttaagcatgaagttgcgctggagaactatttgtttgtaggtgacagctctttgatatatatccgacaccataggccacgggtcaaataaccgccaaattacaatgaatccatggtattccatacttgaagaatagatctggatatgattgtagcaatgcatgacttagaatgatgcatatttgttttatatctgcttagtaccaaatatttcatggatcgggactaaatcggtcgatgcctgaggcgacgatcgcgggattgtgagaccttagaaatgtaaacaatccgcttcgtccgaaaggtttctaaacctctagttctttattcctttgcgtccaagacaacgattttgataggactgaaactgctactgcgacttttccccaccctccacattctttctcccgcttcttatcgtcgggcacgagcgtccgaatttctaaacgtgcgactctctccctgaccaaggaccatcatcaatagctagaacgccaatatggaaggacagtctaaagcatcaacacgccctgcgagtggtataccacgtcctgcaagtggtattccacgacttacttcaagattgcctttacccacgacaactgcatcaaaatcgatcaaaccgtcaccttcccgagacagactacgagcggatcccggcctggacgaaaaaagattgcgaagaccatcttacaatacactcgtgaaaaaaccgtcctcgcaccatttgtcacctcccaagccgcaggtcgatccaaccccggccctcaagcaagaccatacccaaggcggggaagacgatgcacatgttccagaggagacaagctcgattgctggggatgatgacattgtttcaatcgaatcggcccaagaaacacgcggtcgccgtggagtacgcccatcgttgtccgagcgtacacttgaaacgctagcgcaaattccaccatcaccagcttctgtgggaaggcagtctagctttttcaatggtagtagcccggtacgatctcgatctcgtgccccgtccaatgtgtccaatgtctcgagatcgccatcgggggcctcattttgcgcgccgcccagcaacgagctatatatacagcctgtttcgaagctgcgttttccctcgaaggctcctgcgtcgactgctggatctctttctccagtccgcggcttggaggacagtgtgagcccctcaagattgaagcgcccgtcacccagacaaggtattgcaccgggagacagtatccagacggacgtcagttcaccgcttaagagggaaagaccgattgggaacagggatgcaccaaaaccctcgcttgtccgtccatcatccagcaaatcctccacaaagcctgctaagtcagacatgggtcctccagaaagacccctgcaagtgaagaaaacgagaaaaccaaaaacagagcaggtgtcgaccttacgctcttcctcgacggcttccagatatgtgtctgcttcttccaacatgcctgatgacttgtctccagagcaagaggcagaacttgaagctagaaaagtctctaaatcgtccagtacgctgcgtgaaactatagcaaaggcaaaggcagctcgcaaagcgatggcggcaggagaaaaaaaggaaagcccaaaaaagccagtctatcaggctccgcctatcgatgcgcctatcgattcctgggtgggcggcgacgatgatgatcctttcagccaactgcccaaggggtctaactctttggtgatccgaaagcgcgtacagacagcgcgcgcgaccggccagttgaacatcgcggcgttttgtttaaaagagattccaaatgaagtgctgacgatgtacgactacgacccagataactctgcgaactggttcgaaaatgttgatcttgtcaaatttaatgccgcggacaatgagctggaacagatctcagatgccaccttccctgatatcaaccccgaggagtttgatcccgatagcgatgatcgaggacttcaatttgggggcctcgaagcattggacctccatggcaatatactcaaatcactcccgattggtctccgacgtctgcaaaacttacgcactctcaacctgtcaaataattctttgaccatggccaatatcgagacaatcgcagagataaagtctctgacagatttaaaacttgcgaacaatgaattgcaaggggaactaagtgcggtcattggtcgtcttcctaacttggagtttttggatctgcgtggcaatactctcactaagctcccaaaagagcttgttgggttgagttctctgagaacattggacgtcagcgagaacaaattcacttccttgccgttcgaggtcctcagcaaacttcccctgagaacgatcaatgcgcagaagaacaggctggaaggcactttgataccggcatcagtgaacaagttagagaaattgcagtccctaaacatcgccaataatgctgtggtggtcttctcagccaacgacacacttgaacttcctaatttacatactctcctggtcggtgtcaatcgcatcacgcgtcttccatgtatgacttcctggcagtcactattaacgctgtcagccgaagaaaacaaaattacagagcttccgcaagggtttgaggagctcaagagcctcaagaaggccgatttcacaggaaatgccctcacgcgcttggatgagaaaattggattgatgcaaaacctttcctctttgcgggtttccaataacccacttcgtgagcgcaggctgctgagaatggacaccgacgatatcaaacgagacttgcggagccgctgtgagcctgatcctcaggacacagatgatgagggctcagtggccacgcaattcactctagcgcccgagaatcccgtgctcgatggcagctggcagattaaatctggtggaactcttgacaagtcttatgctgaaataaccgaccttacggtggaacaactggagatgcttccgtcgctagacattcgatgcctctatctacagcacaatgagctgagctgtttcccagcccccgcaattgaaatgctcgcacagtgcctggtcgagcttgacctctcacataaccccctgagtggtgctaacttcttgtcttctccgcttgagttgccaaagcttcagtcgctgactttgaatgcggctagcttgacgtcatgggagcctctcttgtccaaattaatagccccatctttgacattcttggatgtatctcacaatcgtttgaggggaccactcccccgtctgagacagacttacccagagctcaagacccttgtggcctctgacaaccaaatcactagcctagaatttgaagccgtaaaagggttgcaggtcttggagctaagcaacaatgaccttgattcgcttcccccgaagattggcctgcttgctgctggacgctctcctcagaattggggcaatggatcggcactgagacgttttgaggtggctggtaatcgattccgagtacctcgctggcaagtagttgccaaaggaaccgatgcggttttgcaattcttgagagagcggattcccattggtgacctgccggaatgggagcaggaacacgaagctcccgaagagttctaagacatgggatctagttggagatcatgatttagaaaggcttgtataatattaccatgtttgtttctatgtacatatacataatatcgctgtccatgcttttctcgggcttttatcatcccatcatcagcttccttgaggctttgtgatggatattcacattcagctttttacaattgacttgctgacctcgtcaatcaccttgagccacgtgttcgaccatgtagtgaacttgtcggcaggtgcatcatccttagcatctgcagcgccccagggtgatgcgaccagctccaccgcttgtgtggcacactttctcgtcttctgtagatactgggcagaggtttcaaaattggcctcgtacaacgcgccagctgcctcgtcgacatcgtccgggatagcttgcagattcagcatcaaggaatccagcttcttgacacccgacgaagaagccaacggtgcatttccggcgttcttcagccggttgttgatgatagctgggtaaacctgggcaataggcttgaggaaacggagggtagatttcttgtgttcctggagggcagcggtctcttcttcgtcatcctcatcatcatcctcgtccttatcatctccggccttctcctcatcgctgagaatatcatccaagaaaccatcgtcctcttcttccggatcccagtcctcgatttcctctaccgcgtcgcgaaccaggtccctccactgctcaacgcggcgcataacaaacccaacaacccctttattcgcaacatcggtcgtggaatcacacgcatcccagacacggcccgtagcgagcatcacagcatccttctcggatttcgtcacgccgctctccttccctgtatccttcttctcctggtctttcttctctccaactagcttgatctcccgaaccagcgccgaaaattctgtcagagccgtcttgacaagtaccaggacctcggagtgaaacgccttggtgtattgcgccggtgtgacgagaagggatgcggtcacgagcgacggcagcacggattcattgagctctcggagcacggtgctgacagcggaatgcgtgaagggcgaggtaatagccagcagggagagttttgtgacgtgtgctttgagcgcgctcgaggaggccgctagtaggggcagggcttcggcatcttttgcggcttcagttgcggctgttgggagcgtggtaagggctgtttggaattggctgatgagggttaaggttgtgccgaggatgccggatagttgtttggacatcgtgagggtcgtgggctggccaagggtggattgaagaagagtgtagtagagaaaaaattcgggcgataattatcgcggggctgattagggctctgcggggtcacctgtggtttctatgtcaaagctacggagtaagtcggggtgacggcgaaaagaccacgtttgcgcttggctcttggaacacggcaacactatcgccattgtacgtggtctttcgaggggaaatcgtggtcatttcacccagcgctcgcgttagagcattgaatataacactagccaagttaggtttagcgcccttacaggagtaagtattcatcatacatcaacgccctcggcgcgtacattatggataaaagatataaaggcagtctaagtcctcgttcagatatcatccctaaatatctttaaccctatacttgattatctataataactgtagagagcggtcgaatcggtcttaacctggtcttcttctagtccccgtcgcggtgctcaaagatagtaatctttttgttaatattatcaagatatttgcctcggcatcctttaacgagctcttttagaatgtttagataaagttcccgttttgaacggttccggaggcttgtctattatatggcgcctcgtgaaattgagggaaagataccggttttcatgcggagacgagggatattctggaatgtaatgaagatctatctgtggttactttgagggcatgtggagtctgtcaaattctccggaagatgtatagttgttatcatttcttgagcgtggaatgtcgttatccctaaccaaggcgcgctgtattcagagttcactctacatacaagctgttagggtcgtttataccgtgatacttagttcgttgatagcattgctgctcccctcaatttttggagcactacatcttatcaaggagatatggtataacgaaagggcgtaggacggagtagagagccccatccgttcatgatgttacttccatctttcttctaattcggagcggctcgagcttaagatctcagatataaaagcaagctgtatggcagcattagcatgtaataatcagttacaggccaagaatagaaggaaccaataactttatgacgcttccagttctagttacgtgcaaatgccaagatatcgagcatttcactatcttaactagaagttttagatagacctaataattagtatcgcttatatatactgcgactttaagtagtaggataattaaaagactaaggatttactagtaggcttactaaaacagctagctaggtagtattagcctctcctaaatagtgttaaagagctctataagtactataaagctagaatacaactattagctgaagaaatttccaaagtcctcctaatcgtagtagcgatatttttaaaactctttattattattaatatacttaacgaatgccaggcattagaccggcagcattttatattagagctttttaaccttcagatacaatataatgtaaatatctttgcgacatcgcgattcatatcagaaattatagatcaattcaaagacaccttatccttagagatccgtgcgaccagtaaggacgttgggatgtacctggaaagccatgtgagacaactacgaccttgtgtataattggcgctcgccctctaaccgccgaattatcactctggcaagatcgtctattatctaccaaggttcctccgcacggccgggtagcctacctgataacagcatgtgcaacgggtatggcagttggtgtacaaacgggcttaaaaagtctgccagagggctaggatctccgtttcatggtccgggttgcgttatttagtcagcgctttccgagaatattaaactcgcactttccgcgtctttgcttccttcactcttcctactactcctccttagttctattctcatcttcaccatggcttctcctcaagatcccccgtcagacgcgtgtaaaaaactcacgatctccgcaaagaactttacggagcacgcgagttttgccgagtctgtcaaaggcattatctgcgaggctaagcactatcagctattaactgtgaccgacgttcctctcgggtgggaggacttcctatgggaggctgacgaagacctgccggcaaataggaagacctacgatcctatcacaggtctactacgtgtttccatcatgcctaccaatggtcacgatgtagcaagcggatggttatcacgggcaatggtgcggtggactcgtgcggggcttacgattcctcaagaagaggacattctgtatactatgtctgatgcgagtaagttactatgatggatctcacgttaaccgagctaattttaagtaggcattgacttcaaatacggcgtatatcgaggctggagaaagcaacctgacgccgccttccgtatagtaggactgaatttgcctacgcttgtcgtggaagttggctggtctgaggggtatcctgatctccttgatgatatgaacaagctgcttgttggaggaaatggcgatattcgagccgttatcatcatcaagttcactcaacaaggcgtcaacgtttcaggcttcctcgaggtataccgactcaactcgcaaggcataccttacctcgcgcaagacgaaaccgtcttccccactccccaagggcaagcggccgctcagcagcaagtacgcgttacacgaagcgagctttttgggaagttcctcgttccaggcatgacgggcgcagatattctccccctcgatgtcgattggctccgtagcatttgccgctcccaaatcgcactgatgggactggttcctgtctaacggccttttcttgtctacacttgcttcactctctgctaacctacttgctctataacatcagtatcaatggaacgcgttaatatgttctggtcggtacttacagtaccagagttaacggccaagcagtcatcctggttcttgataattgcattactgatggtaacgccattgctctcgccaacaacagaggcatcggagttgtggccaccgttatcatcgccgtccgagttcttacagattcgcgattctaaaccgttaactggctgtccgaccaatagacacacagtattcgcctccaaccgccacattcaattggtggttccgtaccgcaagtggtacattgtctctcgtgcttctcctcgttatacaaatttaaagtcctcttttggcgctgcatgttacgatctggggctaagtggagctgtcgagtgggtcaatgcctgtaacgaactcgcacagagcgtaactcttgactacgaaaaggtaggcgttccagcgcctgtgactttcgtcttttgatttgatttgatctcaaatgtagagaactttcctggccagtcccaaaggatatctcgctgcaggcgtggaggactgatatttctatctcgctatatcaacattggatttgccattcttttagacatgaggcctacaggggattaaaaaagtagctgtaggagggttttagatccaggtcaaataaccgataatcaccactctttctgggctgaacgacgcggcctactgctgcgcgtatcggttttcttgcgcatactaatacgccgcttaatcgcacttagcttagctgatagaatcgattctttgtttaaattcgtaaagctatcttgtatccggatattcagcgtgtctttcgactcctgtattatattggctgtatgaggtttcctaccacctcatctagtgtcgccatcgtgttcgtggctagtgtcattcttgaaagacgattcttataacggagaaaaaggcatagcagctcaccaagggaaatactggacgactcttcggtcctgctttaggagggcgatacgatatattcaatgagcgtcccattcgaccggcggttgcgaaatactgcgctggagatgtcacgttgttaccagatctcttcaagttatatgacgcgaagctacatcgacctggagagggattctgggagcttcatatgccgtaagcaacccaagagcggatccggctttcacaaaatccagagtttgataattattcgaaatcaaatgctcgcgggccttgggatcgagagtctattgaagaagcgactaaccaatggaatgacgatgttttggataatgcattgaattgcgatgatgatgacgatgatttctttggatctgaagaatatgatgagtctggttgggtggataacggtctgaccagctgcagggacattatcaataaccgtgactacgaagactactattcagattagggtataaacaggctcagttcagttacaataggatatagtacccgtctgttgatttccatccgcttgaacttacagtactgaatctgaaaatgaatactttcttcaagaatgtactgtaatttatgtaaagaaaccacgactttgtccgagagcggttgattatatttaatcattggattatcagctgaaagattttctttcagaacccgatcacaacattgtcgagaagccaccgaccccaagaattctcacttccatcaccgggtcacgggctgagtgaattcagcctcatggatttatgccacgtcagacctgcatgtagggctcgaaattcacttaccataatatacgtcccccaccttatcgcgcaaccgtcgtatagatctcagctggattgtgttagaacatcattaggtggacttggtctatataagacaattggtgccttagcatctgcactcagccacaataacagtcaaaataggtgacctatacaccctaacggtagcatctaaaggtcgacaatgtcacgtctgtctagtgttcagtaggttgcccatcgccctgaaccccgtcagctaaataatattagaatatcattcggttataccgttcccctaaaacactcagcattttggtatacgcacatatatattaattacctatatataccatatatcgcatttcctataggtgttctggggtaggcggcttacttaccgaatacaatgactgttaactagtgagttatgtgtcagaatctaggatgaatactgtcatttttcatccctgatacagttgggtcacgtgactgaccaggttggttttccgcccgaaaaacatcctttcattttgttttatttgtttgattactaagttgtctatcagattatcatgttttctggactattgtcatttttagagagttagagaattgattgagatttttctgcaacatatacattcgccttaccaccgtttttccgtcaagattaatagtaaaaataccttactggtaggacgtatataggacgtagatagtaagaaaggggctgtaataggcgaaacattcggcgagtaacagttagggcaataaaggcgactttatagacacacacacagcgatgtcagtcacgtagagggagctagacccaaagaggtatactaaaccgaaattggtaattcgccgtcaccgcagagtacggagtacaatctaggttattatgagtctcatcacgtgcgtcttattgtatagcgctgcatcgctacatcgacaagtcagttaccttttgccgatatacctttaccttacaatgtaaatcatgggtatatattaagctaaacatctccgcggcattcccgaaatctcaatataattataatacaaatagtaattcccttcaacatgtagtctgcgtaaagataaattttaaggtcatatatatttatgatactcgctgggtaaattccttgtcgactctaatctctgttaggggaatctcatccccatcagaatgatcaccagcgctcggacccaacacattggtgtacgtcttcccttgatcatagtccggcctgaacgaggtatccatccctggctgttcccccggggagttaggatcatctggtaagtggtagaaagaatgtcgtttcggatgcttgttgtgctgcatgatggtggaagtggattccgcggttcctgaaggctgagtggcagcatccgtggttttggcatttgttctgtttgtacttctgaagatagccatcatggtgccgctgatacccagcatgcgtgctatgaaacggagagcagggcgaatggttgggaggttggccgagacgatgccggcggacatttcgatcgcggtccagccaactgttcgggcgagagtgtaggaggaatcagccgaactgtagctaaagagtactgagaaacggtaggcggaggcgaagacgacgctgttgaagttagattggttagaaaatgatattccagtttggaaatgtgttagtggcttacaagaatcccaagctgaaggcaactagcacggctaccttttcagaaagtcgaagttggagcttccaaacttgtggaattggaaggaatagaatggcaacatcagttgcgatcgttgagacggcgttggcgacccatgtagcaacttggtcgatgcaccggcctgggagctgcggataccatagtttctggacagggacgcagataaagatgaagagaaaggttatacagataacccaaaggatgataaaaagcccaatgacatatgcccatgtcttgaagtaagggaagcggaagatccgatagtacatgagcagaatgctcaatttggtccataccaggttgtacacgtagagaacttcggccacaacaagaaactttgcaatcataatcacgttttccactggaatagtgtccgcatggagccccattcccttatggatcatggcgtagatgaatccgacaacgatgaagttccatagcttatgtttgatcagaaaccatgcggttgggaatcactagcgtgcgagagtcgaactaaccatagaaaatatgaccatatagtcatcccaccacagcttttgcatccgctcataccgggcgagtagtcgaagacaaaccgtcacgaaggccagcaccgtgacagaggccgtagttgctacagaccatggctgcagactgtcctggttgctttccatgacggccggttcagggaggtagacatcgaacaattcagcgaatgttgggcaatagaaccttatgtatggagtacggagtacgcggctgagtttctgcacggaaaggctccatatttgtgtcgaatacacgcctcgtaatattccataaattccacttttgaacgtttaactagagtctgaacttagttttgtggttggcccacagcgggttaggcctctgatatcaccatgctgtaatacataatgttgtatgtatcattaatatgtatcataacatgtaaaatagactgtaggaattaagtaaataacggcttgcagatccaaagtaaaaagatccacgtggatgcagggggtttgaattcattttacgaaggttttggcaatatgaacaaggcccactctattaaacaaggaaagttacggaggagacagtgacaggacgagaaaaaccccaaaaaaagaaagctcccaaaatggtgaatgctagtcttaaaatattgatttttaggactattaaccgggtccttcagtggcgtttgttagctttccatatcctcgattctatacaaagtactccgtacaatggcagtatatgtactagtggttgtactttgttaccatctctagaagagcctcatccacctcctttgggttggtggcattcaagtaatgcgcacccccttcaatcaacacaagtttagcctccacggacgaggtgaaccgtttaatgtgttctgcaggaacggtcgtcccaaagggagtgtcctcagttcccttatggaggcgttaatgtgcaaatcatctacaatcagtgaacataggactcacctgtagccaataaacaggacatttgatgtctcggatccgaagcagaagtccatccctctccaataggcaattgagcgccattcgaaccttctttcgaccctcatcacccttatacacctccttcaaggtctgggtccagaacgcggatttggtttcggtggcagcggaaccaaagccgattccccccaccaatccgcaccagacgtcatccacaacaaagtcgggtgtagccgagggagtggaccacttctcataaaacaccgtgaggttggcagcgggatcccaacagcccttggagcgagaatccgaggattcataatccatggaggttccgaggggcatgagaccgagaatctggcaataagttaataccattggcttggcttgtcttgaggcttaatcagcagtccatttaaccccagggcttagacctaccctctccggggctaggagggccatcctagtcacaatccatcctccctgacttgtccccaggacgaaggctttctggattccaaagtggtccataacctgcagggccatttgagccgaatcccagtacgtgaagtgttccgagggagaactggtcgagccatggcctaatggctcgatggccagaagattcatggcatcggtcaaaacttgattgttgaattgatcatcgtagagagacacggtcatgcacatcgaattcataagcacacatgtcggcttagaaggatcatagtgattcttagagaaggcatatccagccttgatgccaccaaggtgtgggactttgacggtttgaggggcagccatttcgtaatatccagcggtcttgagatgaatgtgaataatctatgttgtgcaataatatacttttagaaggggggggggaagcaagtcattatgccgattaagggggttcaggcaagtgagcccctctatcttggtttttttttcttttttttttcttttacgtctttagaatgtactccgtgctccatcctccgtatggagcatgtcaagcccgagagttgggcaacgctctcggcatttcggcctaaattagtgattgatcttcaattgacagtcctgtggagtcactttcgacagaccgggttgtcgggatttgccagacttctgcacccaaagtataactccgtactaaagctgctcggcagtggggccggatggtttttgagatattactagcacattcaccctctaaaagccaattcaccatccgcgtattgaggtattttggaacataccgttagcggtttcagatacgaaattggagttgtgcatgtcatgcaaccacaagcgcggagatacgtctgacatcgtagccaacagatctgaactggcttcgagactagtccacgggtgggtacacacaggagatcatctgatagagcatccgcttatcccttgctttgggcgtgaaggatctgttggagacgtttagcaggccactctatgtactccgtattcatgattatattaaccgcttgtttaggcaggacggcttttcgggttccacaaatcttcatttccagaaacggactatattggcaatagagttcgcctctccaggtgtattgtcatatggttgtaacgcaaaggttacaaccactaatttagagtgtctggatatcggtgaaatgccgaaagcaacccgttaggatgtgtctaatatatatatctagaacctgtacggactactccgccaatatagtaggagttaatataaatagactatttaattaagtgaaccttttcttagacgtggagataatttaatagttaaacatgagagtgagagactgtgacaatataaggattatacttaatacaggctcagcacttaatcctgacctttagtttctcaatacactttctaccagacatggatcggtaaacgcatcggtaaacgcatcggtaaacgcatcggtaaacgcattggtcaacgcattggtaaatagggtatgtatgacttgcctcggaagaattgtttcgtgcagaccatggcggagctacttagtcacggatggataagtaccagattacctaagcaggaattttcaatagcaaacaagacaaacaccttcatcattgcatcccagcttaacagaagctgaaagccttttgtccatcattgccagccataatggtagcagcaaaggcccgtgctcctccaaggacgcccgcaacaccaatacagcccgtggagacgtcgcggtaccttccagacaagacctttgttatcgacaatggcgcgtacatgatcaaagccggctacgcttctcatgcttcggcctccgacgaaagcgtttccgcctgctcgtcgatacctaatgctctcgtcagaacccgcgataacaagattgtcatcggtgcccagctagcgacagtcaacgactggaatgaggcgatgtttcggcgcccggtggagaagggatatgttgtgaactgggaagctgagagagagatctgggaccagtctttctttgatgggaaggtgacggctcggaatcggaatcatcatatcgcggacccggaagatactacacttgtgcttactgaggcgccgaacgccttgcccattttacaacggcacgccgatgagatggttatggaggaatggggatttggaggatatgcgagatgtttgggtacggtagtctcatatttggtgatatgatcccgtactgacttgaaatcctaggtcccaccctcaacgcatggaacgaaatccattctctcttcggcgatccgctctccaatacatccgacgcatctatcttgcccgcagattgcttactggtcgtcgattctggctactcgcataccacagtgaccccggtttacaaaggccaagcgcttcaacgcggaatccgaagactcgatcttggaggcaagcaccttacaaactacctgaaggagattgtgtccatgagacaatacaacatggtggatgaatcatatatcatgaatgaagtcaaagaggcggtttgctatgtcagcaatgacttttctggtgacttggagcaagcatggaagagtcgccgaaagcgccagagtgggcccgaagagggaatcgtgttggactatgtacttccagacccgaatgcgaacaagaagggcttcattcgaccgcatgatcctcttctgcatgctaaaaagaagaaaggagcggtttccgggctcagcgcggaagtgttgtcggaggatgtactggtgctgggtaatgagcgctttactgtcccggagcttctattcacccccggggatattggtatgaagtcagccggcatacccgatatgattcttcaaagtttgtcggttctgcctactggcctgcactctgctttcttggcgaatgttctcgttgtcggaggaaatgctttgattccgggatttatggaaagactgtgggtcctccaaagttaattggttgaagtttttactaacgaactatctttttatagagaaaccgaattgcgacagatcgcctctgctgaatgtgtcgtgagagtacgccgggctaaggagtgagtggtcatccatctggcttgatcttggaagtactaacatcaatagccctgttcactcgacatggctaggaggcactcgccttgctgcaaatagggaggaactcagcaaagtatccatcactcgccaagaatatcaagaatacgggtcaggatgggctgttcgacgatttgctggccttgtataaggtcctagtggcctgaacagtctttattatgcacgggagttctttttaacaatggcggaaatcggcagcattcatagcatttagtgataccctagttttcagtgtcagtggtcaatgtacacaatcttttggaacgaatataaaaatagttcaaggctagaacaccgtactccgcacattacgatgtgattattcgctctaatgttggaataaaccgtgttcttgcctgcttgggaaatccccagatccatggatccacgtctggtccctgttcatctctacttttagggctattatattaagcacttcgaagtcatctccatcattgttttgcgagtcaacggaataaaagagatcattaagaagagttggtctcgccgaagccctcttgatacactggctacaagaccgcaacccctaggatgtagctgtcaccccataattaaccatgggctcttcaggaataagaaagaatatagcgtttaccaatccatggctaaaaatcccgtacctgaaagatgagatgcaccctgcacttctacataagaggatgtctttcccatattcttagatctggccatgcaatttatccccttttgaagggcccagcatcgatcctccaagttgataccgaatccacggcaatatggccaagagccgctcgtccatccgaaaactcctagactacttggagcgagtatttgcatccaagaaagttagcgaggaagtaggcctgtcagtaaagcacaaagccaatcaaaagcgaatcgaaaagcaatacattaactctcttcatagatgcacagggtgctttcaaagggtcccaacgaccaatttatttactgctccttgtcagcaccaatactgcccctcatgcctccgtcgaatgtcctcgacagccttgaacagcccgggtatgttcccggcaaaatgttgtttccaagagattcccacaacagcacttgaggcagtgatgagcccacgaaacataaagcgctataccgttcgatgggaagagaatagcatccctccgctagagcgcttgtactgtcctcgggcgacgtgtggccgatggattcccccaaagagtcccggggcacggttaggatattgtgtctgtcctcattgccgggcaaaagtttgctacaagtgtgggaactttttccatctcgcctggtcgtgtagccatgactctgagacgaaggcgaccttgcgactggcaaaggagaataaatggcagagatgctctaattgcctgtatttcgttgagaaggtggatggatgtaaccacatcatttgcaggtgtgggcatcaattttggtatgttcatgcatgcaagtcctaggcaaaaaataacactaatcgttaataagttacctttgtggccaacgcggccgatgcgcatgtcctgcacgcggtggcggatatgaagacctggacacagatggaggggatattgattttaatacgctggtcgctgcaatggagcaagcggaatcgacagatgaacctcattggtgggacgatgaggcttagagaaaggacgaggagaagtaatcaatatttatttcccagcaaatcgcaatctagaataatacaatgcagggaagatatcttgatcgaaatgctttcttcccatacgctcagcaactagtagtcgtagaaacccttgccgctcttcttgccaagccagccagcatccaccatgcgacgcaggagaccagcaggtctgtacttgctgtcaccagtctcctggtgaagaacgttcatgattgcaaggcatgtgtcgaggccaatgaaatcagccaggacaagggggcccatgggcacgttggtgccagtcttcatgatactgtcaatatcttcacgactacccacaccagtctccagacaaatcacggcctcgttaagataaggcatcaagatacggttggcgatgaagccgggtgtatcggccgacacagaggccaccttacccatccgctggacaaaggcaatggcagtatccgtggtctcctgggaggtctggagtcctcggataatctccacacccttctggatgggaacagggttcatgaagtgggttgagataacccgggacgaagcctgaaggtcagtaggatccgtgttggtggcagaggcgatcttggtgatggagatggaggaggtgtttgttgcaaggatggcatgcttcggcgcgatctgggccaagctggcaaagatttttgacttcagatccgggatctcaggcacagcctcaatgacaaagtcgacaccggagagaccttccagcgtcaaactcgtagtaataagcccgcggacttcatcagcttgctcttgagtgaggcgctgctttgctacattcttttcgagaagtttatctttcatccaatgccatgtcagataattccaggcgattgcagtaaataaactagaagcgtaccggcaaacttaaggcccttatccaaagaggcctgcgaggtatcaacgagagttaccgggacctttgcattctgtgcagcgacaagtgcaattcctaagccctgaaaagtgttagacctgcagcgtagctgtatattctatgttacacaccatttggcccgcaccgacaacgcccagtgagttgacctcggctgcgcggactgcagaggttgagcagaagttgcgggccaccgcagggcctctgcggagggaaacaaagcgaagagtagaggtaagcatggctgcagtgatttctggaactatgggaaaaagaacaaaaggagggaagaatataagtgcgcagaagtatactgctatgacttcacgtgctttcggaggtcattgtaaggccctcgacagtggccaccaagcgtatatttcaccgccttgatgattccatttgcaaataacgacttcttcgaatataccggcttcattttacgatcacattatagatccatggatatagagcagagtcgaggattaatgttgagtatcatggggctgcctgttatccatatcattcagaagaaaggccccgaaaagggaacaagcccaaagcttgagtactccaaaaatcaaaatcttggaagtgttttaaaaaagtctagtgagaaattatagctcttgcaatatccaggccaggttcttgagaatatatctgaggtcttgcaagttcaagggttacttacctcttactactcagatctatagatctgatattttgccagatattgatattgccgcagtggccgttgatatttggcgtaaacatcggttatcttcggcattttggcggcattcagtttctccgaggcgccgacgccgacgcgtcnnnnnnnnnnnnnnnnnnnnnnnnnnnnnnnnnnnnnnnnnnnnnnnnnnnnnnnnnnnnnnnnnnnnnnnnnnnnnnnnnnnnnnnnnnnnnnnnnnnnnnnnnnnnnnnnnnnnnnnnnnnnnnnnnnnnnnnnnnnnnnnnnnnnnnnnnnnnnnnnnnnnnnnnnnnnnnnnnnnnnnnnnnnnnnnnnnnnnnnnnnnnnncgacgccgacgcgtcggcgcgttcccattcaacccgattcgggaagcaaattaatggggtctcaaaccagcccaccatggatgaagaggttgttcctctaggacacgacgtgcaagtcgtggacccagacgtgcgcaactatgtttacggcctggttactgctgtgagtacacttctattttctccttgccctggctctgggtcaattcgctaatacgcttggttatccagctcggaggattcaatggcgaagatgctgaccaatacgtactcggagacgatgcgctggcatgtctacgcgatatcaaacgctggttgaaattgtacgatgaaaagaataaccggatggatgttgcgcggtgccttggagaggccaacttgatcaatggtgatctgcttccaatcctctcgctctggtggactagtgggcagaacagcaagcatatgaccaggattgcactggcgtgcttggaacttcttgtgcccttaacatggcccgtggagattcatagccagatgacagtcaaccaccatcgtcataccccctacatccaacagacacaggtgcaatacaagcgaggtatcctgaggtccggaggattgaatattcttcgcgcagtcattcgaatttctcttccaagcatggccacccctcgatccgaacgtggaacccgagacgaaggaattctcaagttgatgttgtacttgctgcggaatattgcgatcatatccccgaataccagacttgcggcagaaggtgacgaggaggagacatccagatcggcaacaatcaacgccttccatgagcaagatgcatttgccctccttttgactatgtgctctaatgtcggcgaagacttcaaccttcaagatattcctctgatggagacaattttccatattgtcaagggtgtcaacgtcgagaaattattcatggacgatgagcagcgaaaggccaaggggactgacgaactcggcgatctactgagaaaagaattattggtacggagggaatacgcaaagaatgcacccacacgccatggaagattcggtacaatgatctgggtcaaacgagacgatgagaagatgtctactgtctctggacaaagtgtattgcgcgacgaccagactacactacaaaagatggacgagagtaaaaagtggaataagcctcggcctcgtcgcagacaggaagatgtggaccaaaatagtaacttcaacatgccagctcaccttagttccgaggcaactaagaacctgaggactttcgtggaggagttcctggattctggattcaatcctctattcacccatgtgcgaaaagcaatcgagcgtgaagctgagcgtgtcgtaccgataaatcatcgccaattcttctacctagtgggttggttccttgaagcggagcgcatacggcgggctcgacagctccgtcatcgcacagctcagaatggaggaagaaccaaagatattgaacccgatagctatggtctggttgctggcgtcctgaaccaagagacgttcatctctttgaaccgtgctatgcagaatagcctagacaacaaggaatgggaagatatcaatgcccagatgcgctgcttcacccagattctgctgactgtccaggaaatggcagtgtcaccgctcgaagaagaccaggaaattgcggagaatattcaaaaccgtattttctacgaagaaacaacccatgaccggatccttactattgtgcgcggatacaaagatcaaggctttggctatttagatgcctgcacggagttagcacatgtattcctgcgaatgctggaacggtattccaaagacaacgccgacatgcaaatccgctcgcggcgaaaggccaaacagaagcaaaagaaggccgcccaagtcgccgaaaaagagggagaagatgatgatgaggagcgtgattctgaagatgaagacatggaggaagccgcccaggtcaccaaggaacgcagctttgactttaagcgattctcagccaaattttgcaaccaaaactgtgtggataccttcatttcattcacaggattctaccgggagctcaaccctgagcagctcaaacgcgcccaccgatatttctaccgtattgcattcaagcaggagatgactgtcttgctatttcgtgtggatatcatcggccttttctatcgaatgattaaaggcccaggccccatggactcaaacgagcctatcttcaaggaatgggaggaattggtccggcaaatcattcgacgactagtcaaaaagcttgagcagcgccctgccttggtcactgaattgctgtttagcaagatcaactccactatctactaccttgaatatggacacgaaaagcaaacgatttccacatataagcgtcccccgccggagctcatgattacatcgacggaggcgacgacaagggaagcgaaactgcacatcgtggttagtgctctcgttctcgatggtagagcagatctggctacctggatcaaggatgtcttgagctctgcagcctccgaaagagaggactgggaaactcaagaagaagtaaatcgcgctgagaactccgagactaccggcgttcccaatccgatgattcgtatgttctcctaacaccctatttcgcgactggtactaacaacaaaacagctgtcaaaggcaagaacgagtttgttcagaatgccatgttctcgaacgcaaagctacgtctgctcatgaccgtcgtcggattcgagcgactcggcgttgaagatgtgcttggtgcctcttgggtcgtcccggcgtctctcaaatccgacgacttgcgtgaaacagtttctgaaatcttgaaagcccttcaaaacccgttctccggggatgttaatgatgatcctcggaagcagatccaaccaaagcacagaggaagcggtcgcggcagcactactcaaggcacgcttgatgtcaacttcggatcagagtccgaaggtgaggatattccagatggtcctttattcccagcgaatctgcggtcaaagtctagtgcgctggatgacctcaaaaagaagcgcaagaagaagcaaaaagccaccacagaaacggagccactggatgaagagactctagaggcgcggcgcgatgcgcgtctatcaaacgcactgtctcgccaagcgaagatcaagagtgatctgttcatccatgccagcgacgaagaaagcgatgcagaagccgacaaagagttcttccgacttgaagaagagcggagaattcaacaagcaaaagaaatcaagaaggcgttgctcactggacccgtccagcctccaagaaagggcagaggcaagaagtctgccgcccgcaagcgaactagcgacactggcacttctgcagccgcaaaatccaagcgacaacgtcgtgattctggttctgctgctagcgaggctgggagtgatgccgatggcgatatcctcatggcagaactcgacgttcaatcatctcactcccagcaaggaatctctactagtcatggcgccggagaggacgaagatacccgtcccacgccaagtgatgatgatcttgcttttgatgatgatttcgccttcactcgagatcatcctagcaaaccccaagctacggagcccgattctgtagacgatgacgtggaagatgagcctgtggttctggcccggagacgtatgcgcggtggatttgtgattgagagtgactccgaatagtgagctcactttgatatttgtgagaagtttcgattatgatgacctgatgaggcgtttggcattgtgatggaaacggaattgtaaagcatcggatacctaagctcaacgagaacaattacgatttcatatttcaggttatcgttctatccagcatagacaaactgacaccctacaaccatgccgagccccagggaatgcgccagtcctgcaagcgagggttggcatcttgggcattgtggaggatgagaatttgtttgtcctgttcgtcggatatctgtgcaagttccacacatcttctgtcgtttaaatacttgaattgttctaagggggcatgtctgtgagtcaaaagcgaaaagtgggggacttgcaactataaaaaccacccgacgtccccgacatccccgatatccacgacatataccaatatcccaaatcccaacatgactcatcttacattcgtcaccctcgatgtcttcacatcgacaccctacttcggcaacccgctagcagttgtcttcctcccagaagacgactcaaacgctctgacgcagagccagaaacaaacaatcgcacgggaattcaatctatcggagagtatctttgtgcacccagtacgcgagaaaagcaagcgcaccatcgatatcttcaccgcagactgcgaaatccccttcgcaggccatcctaccattggcgcggcctcctggttcctgagtcactcaactgaccccgctgacggcgatggcgtcaccaccctcgcgaccaagtccggcgacatccccatctccgtccagaacgacgtgaccaaatacgtcgctgcgcggattgcgcacaacacacgcatccatgctacgcggttcagcttgaaggaattggtgaggctgcaccctacgctagcgccgttcttcacgcggccagacgttactttcccgctcttttccattgtcaatgggatgagtcagttgttcattgagcttccttcgcttgaggcactggctgctgtgacgcccgcgaccggcggtgagctggtctctactgattatcttgatgaagggtggaaggctgggttaatctgcgtgtacttcattgttcgggatgttgaagatagtgttacgaagaagaaggttattcggtctaggacgatactgggaaacctggaagacccggctactggcagtgcggctagtggattggcggcgtacttgacacttacggagggtaaggggggtcagaattatcagtatcacgttgtgcagggtgttgaaatgggacgccgcagtgatattggtgttgaggctacgttgtctggcgacaaggagattgaacaggttgtgctgacgggcactgctgttagcgtgtccgagggaaaagtgctgattcctcatgcctaaataacaaccctagagctttaatgagtcataatgcaatacttttgtatagtcttctctggcgcaacggcatctcccaaggtcaaggctgcctatgattaaattcattgctgcctgtcgagagaaatagctagattccatagtcctggaggtacctagtgaagaggaaaggcacgatgggtagtctggcagagcaaccaacaacaccaaccttccaagtaggccaactagcaagtataggagatcatggaacctcaatcattcaaccttcctagtagaaatatccttgtaaaatgctaagtcctttcgatttgatatgatgagccaaaatacctttctgcctgaacaacagggcaactacacgatcctgataccccactacccaaggtagtagtactaccctcaagttcccctcacgacttcggatatgcaatccaccttcacctaccttgtgtacttcctatccttctgggccaccatggttgaagctcttactcggtatcagaccacgcccccgagcgacgccattgtcgtccatgacagacaatccctcaacgatctagtcaagattcactcggatacagttctctacgccgagaatggagggtattacctcaagaacatggaagaagaggttgttgccatcactgccgacgacctgtgcaaggagctggacgctgtttttgccagtatcgatgccgaagttggctctgggtctgaagatggagaatctggatctctcggtggggcaaatgttacgaaggggaactctgtctgagctacacagattgtcacagcacatggcacacggcacactgtatctagagtgtgctgatgcgcttgatggtgttggaaaggctccacaaaggccccgggagatttggctggggcagtgaggctggggcagtgaggctggaaaagaaattcagaaaagtgggcacgtctgagaaaactagctacgggcctttgggttgcaccagaagctattgaccactaaagaggctaagcccattgaatttattgcatccatagatagtgaattcaaggctgacgctagcataccttgtccccagagagacctaaaatgggattgctgtatcatccgtcaagcatgcttcttcggtaaaattgcccaagaagacatgtttccaacgaaaggtcctcagcctgaccgatggagcaagccctcacatacaaatcaaccggatttccggcaggctcttgactttcgctattgcaatctgttagaaagaagcccttgccaaaatatcatcttaattgatttcaaggtcccctttggcccccctcttcttgccagcccagccatcgtatctgtctcagcgtgcacgtgaatggaggcgcagcggtggtaaccctcatgctgccaattggggacttggctttattcgtggttcacggagtacgaacacggagtctccccccggtccaaaaaaacaaaatggaacacttcagatgaatgttgcaaccacccaaacattacaaatgaatcattctgcagaaggcggtgtttgttctcattctaaatgtccggtgtgctgcgccacagcctaggcagggtcagttctatttcgggttaccacaaggctgagtgcttgccgtggcgtagcgtttggacttcaggggactgcaactatgtaactaattatgattctacataggtagccggccttgcaagtctaaacggttcaattatctacattttattcctaaatttgcgcattaatggcgaaatcctctaaacttcatcggtatacacgacgccgagaattacatgcccgacaggcaagatcaaaggcacatcatgtacaggagacacatttcaccgaacctttggaacacgaacagtccccccttttcaagaggtatatcctcttgtacctatcactctactcctaacattgtaaccctaggttcttctcccttccacaagagatcaggaatatcatttacaggaaacttctcgtgcagcgatgcaaatttgatttggaacactattacccatgcaaactgcctattttttatggcagaccgggcccagatccacatcgccgggttatcgacagcttcgaaggcccccaatgtgcagcctgctgtagctacacctggaatcgggcacaagtcccgatatcgaaatcaccagcacgaagccagtgggcaaagccatataaaaatccatatctttgcgacaattgctatgggacttgaacgaaagtgttgacgggattccgtgcttgtagtttttaccatgcctatgcggaagacatgagaatctagccattctgctcgccagcaagcgattctggaacgatgctgcaccgatcctctggaaggagaactggttcgccttcgaggatcctcccctcctaacgggattcctgactgctatccgcccgcaagtgagatcgtggctaaaacggatatcgtttatgcctcttcatccttatctgactagcggtatccccagtagtacagatacatgggtgccgggttcgatctggaatgggtgggatgatattgaaaactgctggggtctgctgagactatgcgaggggctgacagagctggagcttgatgtagtgtttttgacacgcaaggaatgggctcaggctattcgactaatttctgtcaagaaacaagttacctttctccgccagatgaactcggaggatgttgactatgtgactgaagattcatggaaccttatatggaagtcgcacgttcggcggaaacgattcgactcgcccacgactgctttactcgcttctagcatgactggtgacagggctattaaaagaaaagttctgctgaattattactctgagagcaccccacatcaaagatgtggtgattacggggtcaagtttactgaggacatgaacaagggtcgaagacgggtttcatgattgtcaaggacggcgtttcccgccaatcatcaacttcaaagcttcttctcctcaaccaattgcctcaacactttgattgttccctcaactgctgcctggctcatcttcttctccttctcgagtagctccgccagctccacctccgagacacctgggtgtctccattcgaagatatacgtcatgtacagctctccaccagctccttgactaatcacattgctgatcttgcttccatttggctgatcaaagtctacccgggcaggctcgaaagctgtaacggtctctagaaccttcttctgggtttcgcggaagaggacttcgcgaacggtgacggcgttcccagttaatgagtcgatggattcactgacgaccctggtggattgaattgctcccggaacgaatgtttctgcggagcggatcttgaggaggaggcccttccaggtttgttcgggggtgataacgggtcttgcgcctggtgggttgatcggggcggtgaaggcgacgttgttggttgagctcattttgggaggataggaaaggaaattctcagtaatttagatcaatgctttgaggaattctgatcaccaattttgtccgatcttaaggcttttgactattcgatgttcgatctagggtgcgaagagcgatgacgaagccgggcgataacgctgataaggttaataagctcggcgttacggtggcccggagaccgatgatctctaagacttctgccttgtatatcaggcctcaatgttacccgatcgggacaagcagggtttggattcgggccatggaaaggaggacttgagaatgctcgacacaacgaaaattgagggggttttgaaatatgatgcccctccaagcaggttgcttatattcaaggctaatctgtatcttcctctggaatggtctgatgatccaattcgaaaagcaaaccctcgatcctcaagtacatagcgcagtgctttgcatatcagttcattcgcacgctccaagatattggatactattgaaattgaaatttcgatggattcatctttttgtcccataactaaacattcaatcaatgaactcggtcataacgaacgtggaatctctgaatgcaagagattcctatactaccgctaaatcaatcgaagaatccatgacccttggaaggcgtttctaaacttgggctaggaagttttactcgtaagcaatgatggatggcagaatacatcctgggttatgaaggtcaccagaacagcgaaggataccatggaagaaagggtcattccgctggtcactgacagatgagggatggatgctcaaacaaaccagttccccgataattccgaatttgtctgtaagcaaagtggcgactacatactatacgtacatgtatggatattccggaaaatgaaggccgagaaataaggttgttttagtgtgggggggggcgcatcccgcattttgtcctatctttagttcgcctatcatcagccacgaattgaaaacacataacagcaacataacagcaacataacatggaatccctgagttccggtctgatctacttggcagactcccgcatatcagaacctagatacctcaggcactcatatcatgtggatttaatctacaagggataacaagcttgtctgcacttgtccagaagaccgaggtctccggggagaaaatgaagtttccatgctcgatgatattaaatgccgaaggctatatcggggtgataagcgagacgcaaactggaattctagtcgtgattacgatattgtcatatgttcatcagatagaagatataagtttctgtacactccgatatgataatactacatgagttctagctttcaccagagacaacatacaccggagctgcacggaaaatgaccataatagccaactgtggcctgttcgaaagctactggtttttaatacatctaataatcaagaagctacgccccggtgtacgaatcaagacagcacggaatccgctttccacatcaagtcatggtggtcatcatatatcggcagagataataatgacataggaagcggaagcaaagaaccgatcaataaccagcgttcaatttgaaactgctttatcaccacggaaaatacgatccgggaattgttcaatacatccctgagctcaggctataagtgtctcgctgtagaccctccgatgaagcaatagagccagagaccttccaatcgattatatttctcatcacatcccttgaaaaccaaacaaatccaacagagaaccagcccgcaaatatggccgtcgcaatgcagtccgcccctatcagcctcgagacaatgtccgacaacatcgatgctgtcaatgtccacaagacagacctcaaacaagacaaaggactttacgatgaatccgaattcgacaagtccaaagacaaggctggcttccgtcagttcgaggatgcctgtgaccaagtcaaaaacttctatgcccagcaacacacccttcagacggtagcatacaacctgaaagcacgcaacgacttcaaaaccaagactcgtgcacacatgactgtttgggaggcgatggagaagctgaatacattcatcgatgaatgtgaccccgatacctccgagtcccagatgacccaccttttgcaatccgctgaagcaatccgcaaagagggaaagcctcgctggatgcagctggtcggactcatccacgaccttggcaagcttctctttttcttcggggccaagggtcagtgggatgttgttggcgatacctttgcagttggctgtgcgttcgacgacaagattatcttcggtaacaagtctttcaaggacaatgaagactataacaacgaggtctatagcaccaagtatggaatctattctcctggctgcggattggaaaacgtcatgctttgctggggccacgacgaatacctctaccatatcgtcaaagatcagtccacaattcccgaggagggcctggcaatgattcggtaccattcattctacccgtggcaccgggagaacgcataccatgagttgatgaatgaacatgatcataagatgctggaagctgtgagggctttcaacccttacgatctgtacagcaagagcgacgaagtcccagatcctgagaagctgaaggtaagcttgacccttggatatttggattctaccacgatgcatgctaactcggtactggacagccttactacatggaactcattgatgagtacttccccacgaagatcatcaggtggtagttgtgccgcactcttcctgtttttacaatcaaattgatactagctaaattaggatcagcccgttgtccctttaaacattccctgataattataaaacaagatgtaactccctattacgtatctcacatgcgagcggtgcacaagttgaacggcacagtccaaaacacatagtaagtgcgataaattacaacttgatatctcaacaacggtggtctattaattctgaaaataataacattgttgttggaataagcggccgactattcttgttctctatactttcaattctacagtatctatactagaactcattctatcgcccaccagattcattactgtaatatcgctaggacttgaatactgcgataaagtggagatatggagcatcgaattgtggaagcaaggagcaagaagtgatcgatcgatatgttagttgtggagagaactgccatagatccatatatataagctcatagggataacgaaaacgaaacaagagtcatacacgggcaaagagaggtctgaaaaactacctaatcaagtaacgacaaaacaaccaagcaggcaacggtacataaaaaatagaaaaggattctggcacgcattgtggcctgatttggatattgcctacatatttcagcgaccagctccttgatcattggcagcgagcatacccaggtaccatagcgctaacaagactgtcaattgtgattgcgcagcagttctaccactagtgaatggaatagtcgggacaagttcaaggttaccgtcgaaacataactagttctcggttagttataagaaatctatatcgagaatagtgctacttcttataccaattcacttaactaaatggttgacagtactccatgcgcacggtatgactgggatatgctgctatagcagtgttccatttccaagacagcttgatatctctaggagcgtggttccagcttatgccttccggaactccaagtgggtaaaatgaagtatcaggtgtgaaggaatttagaattattgcatactctccgacgtcgaactcttggaaaaatattgtcggatatcgtacttatcaaagcattctccgatatgatggtgaggtcggtagaggattcggtggaaggcgtgtctgtctaagaacgtttccatgtctttgcaaaatgatgttcaattcggactcgcgccagaccccaatgctgtggaattttctgcttcataggctgagtttgttgtgtcgagttgaatgaggtgtaggtatgcctacttggccctccatagctgagtagtgataatatgcaaatcaacattggaagccccgaaggccgggttatccccgagagacccttggctctttgttgtgaggtctcacagttgaaagttgtggacttgccgagccttcgcttcggtatttcagagatgcccgttcagacctgcgtcagctaaatgatgggaaaaccagatctaagcggcttatgaagaatttgtgacagagcgttcgattcggaagatcagctacaacctagtaaatcggggccaaggaagagcttgatcatcagttgcagtaaaaaacatatgcttcgtcgagtttcccctttgcatggtcgcaggcctggtgaatgtggttagacaacgtcatggcacatgccttcagagggaggagttctcacaaggcaatcgccaatgtcaacaacaatttgttcttcatttctgagaagctgctcctgttcactggtgatctgatgttcgtcgtaggtttctgctcgatcaaagtccatccacaccactctttcggcagtacctgtaacgaccatcatgttccttggtttgggatccctgtgccgcactagggccttatgtatttgttggataccactgatgagattatccatccgttgctgcgtataattctctagagtgatcatttccagaccggtgatatactccaagaatatggcgctaggtgggtattcgtcgtccaggaacattttcaagtggggtaggcacgcagatggatcgaatttcctcatagaccctaggaaattgggcacgattccacggtcacatagacccctgtctttgagttgggtgtaggcagtggtttcaagcacatggatgtcgagttcacagttctctggttcgtaatattgccgtgggccccttccgtgatgcttcgcatgttagtatttcggtagtcaaagctacctatgctggcttgactcaccaccttcataacacatgtctggccgcggacagtgacaagaaatattacggaatatgaagaggcaaaaatcttcttctggaagcagatctccgtgggatataggttgtcaagatttgacatgatttgatctagtcgtgcacagaggtgccaaaggaaacatgctctgagagataaggcaagtattggtgaaggaagaaaggagcgatggcaaagcaccggtcacgtataatactggtcacgtgtagtccgacctctgggcgcctgaaacagcggttgatgacctcaccgaagtgtatcgccccttgaaattcttctataaaaaatacggatacttgcgccataggggattgtatcagagactcccacatggttattcgggacccccttttggtttattcggactcctgctgtctgatctcttaggcttcaactgaccgcctaccataaaagttcaccgcttttctggccgcttttcgtacaatttactgtttatgtttgctaagcgagaaggttcgatgtttgcaatgtttgcaaagggtcaactatacgagggatctggatggcctgcggccgcccgatagtcgttgcagagcaaaacgactgattctaacttctaatgctacgtaaagtgtgatgtagaagctctggggaagataatgatggttctttctctagtctatttattctgccggttaggatattctgccaaagttagctgaccgcatagcttcttatgattttggagcccataggagaaaagacctggtcacgtgacatgcccgcgaggttatgatttaattgcttcgcttcgctccgcaataatcaggccgtttcccactttgtaacttacttcttctttctctccatcttggtatgcttctctatttacacgtgacctgacatctcacaataacttaagggcatgttttcaaaggtcgtcaatacatggctccgcatttcgtgagtcttagggctggaatctggggtcaatttccctggattttcctacagttaatcttgttacggtcgaccagtagcaaagccctttcatttgccgacctaagaggccaagacctaaacgcctgtggatctcagactaataaatttaaacaccaacttcagaaataaatgaccggactctgattattgcgctaggtaagctttagggttaaaggtatatgtggtggaaatcatctataagcctccttatatgtccgtcagctagcaataacctttcatctactcttcttcgaatttctgccacgatgtccttcccgcagcctactccgacggtaatctcgagggagcatgtggatgaagtgaaagaggctacctctctaaccccaatgggcaagggaaatggagatgacaacaatctggatgatattgcccagatattaatggaccaggaggatattgaatacccggccgagggtgagtattcaccacttttgtagtctctatcgacctaatagattagaacatcgaaagctactgcgaaatattgattggcgaattgttcccctcgctgcttgggtctgcggtctacgatttgtggacaaggtacatatgaaagagcagttcctaccatcccatggattcttatgcgatattatagtctggtcttggccgccacgacatatggtcttcgcgatgatcttcaccttgttggccaagagtactcttggtgtgtttctgtatggctccccagcttggccctctcaagacaagaccactaatgaaggtggggacagatattctattttggatacctgacagggtctttcttctctggtcgcggcctgcaatatttccacgctggaaagtttatgggtgatgccttgctatgttgtattggggccacgaatttgctttaatattggtattgaggttcattcttgggtacaacatattcatttgttggcaataaaatctgtggctgataagaccttaggcttttcgaatcatgccttattcctggactattgcttgtgtatgtcttgaacaaatctggatgggtataagatataagctaatgcactgttcttcagcacaaccatgtggttagtgggatatctggcaatatactattcatgctaatgagatgaaggtatacacaagaagagcagcttctgcggtttggtttatggactatgacaaacggtgctcttccggtgcccttcttaatcatttactatggtctgtatgccaccagatctctcttttcaaaaaatctaactttgaactgcggggcttagtcatgtcacaacaggtcccatagttagtaggttcatctttgtctttatgctttgctatagctaacgtctgcagacatcctggcggctcattttcctcatcattggtctcttgagcagtttgacaggggtgcttatgatatgtgcagtctactatttccgatgtaaagcctaatttatctagtttgttttcatgcccgatgcgccacagtctgcaaaatggctaagtgggcgagaaagggctatagctgtcaagcgcgttgcccaggcctagcttggacttaaagatagcaagccacctaggaacctgtttgatatcatgtactaatcatcttctatagctcatttcaagtgggagcaggtgcagggaacattgagagacccgcatgcgtggttgttaatcttacagatgttgttctctcagactgctgggaatgtgacaacaaacttcctcgggattgtgatcaaggtaatacccaaacgagcaccttactcattcatcaccttactgataaattaggggtttgggtacactgcactgaaggcacaattatataccacccccaactatgccattcaggtaaagagccgcctcattccatcatctaaaagttaaacactaaaacgtactctagtgaacccaaatcctattatcctcttagtatattgtattccatgtcacgattgggattcgttccttcccttttcgttccttcccgattgggatggcgagtcagttgttccttcctgaacaagtaagcgagaatagggctttgatcgcaggggtataagatccccaccgtagctctgttagaaatttaatctttctctttgcattgacttgacccgtaatactctaactgtcttctctgagcatcctcgctggtaccgatctttctgcggcacacacctcatacaatatgaactatcgcctgtgtgattacaatcctaacacggctgctcccggatcatcgaatgggtgcggagcccacacggattatggaaccttttccagtatcttccaagatggcacgcccggactggagcttgaagaaacccctggcacatgggttctcgtccccggggatgccactgttgtcttgactggttggtgtgcggttatcctaagtggtagccgggtttccgccgccaaacatcgtgtctgccgttccccgggcgtgcgtcggttgagcgctgttttgttcgtcgcccccgaccttgacgtgaaattgaagcctctgggtgattctcagccgatccgatctttctccgagaccatcatgcgtggagacctagatgttgagaccttcaaggacgttatggggaagagatggcgataccgagagggaaacgaagagatggacaatgcggactccctctcccaggataacgagattgagaacatggtgtggggctaagcttgtgatgacgtccagcattgcctaaaggtagctctgggcatttcttccagatttcatggcactttcccgggttccaggccactatttctttgtcctttcatctccatgaagctatttagaaggcatggcagaatttcatcagcagtttatcccacttgtgttggtcaataatctttctatccagacacgtagacgagatgcgtgcatcagtatctttctcttctccacttttctggtgtattggctttaaatgagtgtatattcaacggaccgcgttccaagaggaagtattgggccatgaacttccaattatgagtataaagttcgatctactctagaagtgctgttccctgcgatttcgttatttatatatatcatagtatcgataatcggatcaatattctacatatagtgcatctcaacgttatttaggtatactggacctatagtgacactaaagtgctttaggatatcggacgccactcctatcattgctaagtggttttcggtggatttatcaaagcaacatcttgtccttcccagagcttaaatgaaaagtaaacttgtcttgggtgaaatgcgtaagggacaacattatatgctacgcggttatcctcttttctacagccaattttgagtataaaatgtatataataacaggtaaaatcgcttgtcattggttgtcattaaggaaagtggttggtatacacaatattcagaccataatccgagtcatcatatcacttcattcaagggagagcagcaggggcgtagctctgatcaggcttgacaaccacaccgccagcaagctgcttgtcggtataggcaggccagataatctggcgagcctcattgacaatggagagagtagtgaagccattctcctcgccgaactggccgctccagccggaggtgacggtatattcgccgcaggtggcggggccaccgttggccctggaggcaggggcaccctccacgatgtaggtgcagggagtggcatcaccggcgccggggtagatgccaaaagtccaggtgcaggaggtgtcttcggtgtcgcagacacgcttggtgtcctggagagtccactggggggtgtcggccatcatggacttggcagaggtgtcggcgggggcagcgaaggccgaggaggcaaagaggccggtagcgaggaggagctgagtgagctgcatgataatggttggaatgttgagtttttgattggattatttagtcttgatggatgttggtgagaatgaagaggccagacagtatgggagggatggagctatttaagtactttcctccatcatctaatatcaagtttcagctcattgcagatgactctgaaccctttcgtcaagctcgaaatagaactatagggatacatgaatgtaacgtcgagtcaggtaacacccgtggacccgaaatacgttgctccacaacagtagaagtgagacagccctgctagctatgatttgatttgtgcattcctctctatgaccttgtttgtttctcgacatggttgccaacataagttccgtttttatctaagacatcgtcaaaacccaacgaatcagatatttctacagctgcaggttcaccccgcaaatatggtcagaccagctgtcgatcaccagtcgatgactctgtgtcatattctcttatacgaagcaataatgaatgctgtatgatctgatttccgaaggtaactatgtattctggaccctgtaaccccggttacgccacgatttccacgccacccttaggaaccttggaatggcgttgcggaaaaatgatagaagtgggccaaggatattgttgattggtgagaacattgcctaagtggacatctttgatgaatagccgacataccgccttcccggtccgcattccatatccggacaatagaactgtatatagatacatttatacattaatagatcatgataactcaatgttgaggaaaagaacccagttaggctccgttctggatggttgggacctaaatccaacagttcacctgatgaccactttttttttgtctcgccacatatcagtcgccaagtctttcgtggccgcttacgggagattgcagacgatctttcaatttatcactcagtaggcgttggaaaatgaaaggatcgagtgatccggggccgcagtaaacaccgattcgctgatccttccccccactcattcgtattctgtattgtaggtaggctgtaggtaggccccttacgccaggagcttttcgcttgtccctcagacagagatctgcgtttaatggtgttgtgctggctacggagtactgcttgccttaaatgagctttgaggctgtgagggttcgcctttttcttgcttgtcagatcgcaagccttctccaagggttgatttcacatgacgtaccacgttaggcgagccatggtccattgccactgtctcttcccagacatcagtcaatccccacatcgaactaaattgtccgctgcagatcgaacaggtggtagagatcgttgctgggcgtggtggagccgggttttaccgtggcggtgacgtcggaatgtacagcgcaatttccaggctaggaaggcggtatattttctatttataaaccgaggaggcagtattctcaccactaggaactatgtatgtgtcctcgtccgatgaatatcctttagcctccgacctctatcaatagttaacacttcataccgcttatgtgcccttggcgaatatactgtcccatggtttaccaatatatgggctgagccgggggtcagcaatctcacaatgccatatctgtaatctcggtccaaggaacgccctccgacggatgttccaagcacaaacaaatttgcgtcgatccagggatcctcttaaataaattatatggtgacatggggtagtaggtgatccgttaacacgtcctgctgcaatgttcgccttggaaatgaacacgaagctcgttgcggtgggatagggctcgttggaatatagtgttacagtcgacctcggtttcattgaggcccttcaaatctaagtgcgccttgaacgtcctcagctggaaagtcccaaggcaggcagccacttctctactcagaagtatacatgaaatcagcccgtagagtgtacttgaaatctctaaacacatcatccccaccatggaataagtgtctttgaaagatgatgacagacaccgtctttggaaatatccgaacgaattccctcgagttcatctcagccgtaaacgacgttgcaccactcagaagagtatcagtcgtaacagaagaccccacaactgaagcacagctcctgtcaccaactggacccttctcagattcaacatcagcaagaccaatctgccacttctttgcaaataacattactcttcttcgcccacccaatatgaggctgcaactcctccatatcctattcctcatcccatctaaataaattgtgaatattataaagcgacttctccagctcatcaggcggaacaaagcactcatcccaatgaggccggaactaatccccaccctcataacgcaggaactgaagacgcgcattcagttgacagagacggagcatttctgccgttgtcactattgtggtcttgaaagccggaaatttaaaagggtttgtttgtgttatggctgggcttcttataccccgctttttgaggctctgcccgggaatactgcctgcagcttggtcgaaggattatggttagctcagctgtcctatcgtcattctatatagcaaagattttttggagcagttgctaacgatgaagtagttgatgtgataaaagtgacttgttttgttagtggtttatatacaaattgtaggtaactatctaccgtcttgctagggagttcgttcgacactgaggcggtgtggagggcggtaagatgggtagcgaaaaatcaggcagggtgtaagggccccgatgataacgttgtgtaagaccgtttaccaaaggtcaaagacacagatagtctgatgaatctgtaattcaaggcaactactgataatcaaataatttctatactgaattaccgttatcaaagatgcaaaggaaatgaagttagaagatccctaaaaataagattatgtaagtatgacatccgccacatgtggcacaagggattgtggctagagatttcttgattggttcacggcccatctcatctctcacatcctctcatcctccattatttggagccgacaaaatatcattatctctgatccgcctcaaagcacactcttttatttagcgctggacatttttatttctcgctatataacagcaacacaaagtgatctcatcgcccacaaaacaatcattgcgataacctcttgtctttcacattttgattatccacttcgaagctcaagtgcctattcaaaaatatctatatataactaatctcctgaagccgaaagttgcgtatttttgggttgagtttgactattggaacagtccctcgcaaaaagccatgtcaaccgccccgtccatggctgctaccaatcagaactccacccaagagccagcaaccagcaacagcgggacttcacagatggagtcagagatccagcttgtttcatcactagccaaactacaagaactcgaacgcaaggtaagtacacgagcccttacagctctgccacagagccaagttaatgagatatccagatccatgaactgcgtggattcatgccccagggcctactagagcctctagtgcctattgcaaacccagataaagtgtcactcggcaatccaatcgctgaaacgccacggatcctccgggctagtctagatgaaaccgcacgcgcacgcgttgctgatgtccagcaatttcagtccttgtggagggatccggaattggccttcgtctgggcccatgttgaatcacgcatcagggaagccaacggccagctcttgcagccaacagggaagtgggaaagagattacgacgttcttctagaagaactagcacgaaaagaaaagtcgaaagtagatgagcgtcagcgagaggacgaagaggctgaacgtatcaaagcgcagtctaccgagggcgagtggaagaatgtcttggagcggtttgttcagcgcgatattcccggtatacgggttatcaagagccaggatgggacttctctagcggtagcacttgttagagctggtgttgtcttccagatcaaagggatatcttttcctggctccccagtctctgactgggaggtttcgagtaatatcgctggtcggtcacccacgaaacttgagaatgctatactggaatgtgtggggtcacgcccgcggaaatgggaccttgctttcttgctggtatgttctattcctgacaccgaaggagattcttgctaataccgatgcaggacatgatctcttcctatgcggatatcaagcagacgccatgcgtgaagtgcaatcgcctggctgataacggcgcccaactgccaactctccgtcgccctcgggcgaatgaacagtctttcaatgggccagcgcgtatatatacctttgacgcattgcactccggatgcgcctgattgaacggttcatggggcctgaatggacgatgaatatctcttaacccattcttgggtcacagagggaatttttggaagaccatcggctcagtgggctatatccatctcatcttggtcttgacggagaaattgattggaagcattcgagcgatctatctggatttaacagaataccatgcaaaccaccctcccaatacccctgattcctttctccccttcctattcattggccttaatctgcatgcttcccatgaatattgtcatgccaaaattccgctggatactcagtcccattttgatcccagtatcgcctcggaatacaatgaacttcctccttcccggtccatcccccccttcgagcccttctcccattgcaatactcaacagcactccacgtcccatggtccggggtatggtacttcctcgtgcggaaatcatagcggtcgcccgcgggccgccgtgcccaggggagcgggctgtagttcttgtcagggtcgttggggttgctctcccatcgggaccattcttgtcttgtgggctctgaccggggttgagaggatgactttctggtcttggctttgggttggccgattcggcccacgtagatgtctggccctttgcctgataggacatcaaagaagcgccagcggcgtggccagtgttgtgggttgccggggcgtggatctttaggccagatccaacctagttgggagggcattgtttgtttgtttttggctctggatacttatcggtgatagttgggagtgaatgttggatgtggaagacttaggacagatgaaataggtaggtattagtttcatggattggagaaagggcagaaggagattaaatagcctcctttattttctaagctttcatctcagtcaatgaaccgcttgaatgacttcctacagctttttttatctgtaagacactccaatttccaattgtatgaagtaagacatcaagctgttcgtttgtctttgcgcaatgattggaacaattgcatgggaggtgggactgaacgcctcagctcacaataaagggaatatcacggctgcgcgcatggcagattttatatttccggtaggcaaaaaaggatgatctagacgatcaccatagagtacatgtatgtatttattcttttgattggggctatagtatatacacccctgtgtagccaggtcattcggccatagatctataaatgaatcttacagacaacggctaagcaacacagcgactaagtaaatcttaaatattaaacattatgtcattcatgtttcagaactgtctcgatcttgactttttgatttcattgatctaaagccttaaacatcaatatcattgcatcaagtgactctccaccaaagaaagaaccctgacacaagtttctatcaagttaccgtgcaagttctccagcaaggccatggaaatcatgagccagtcacttcccgcaaaaacataatcttcaaggtggacgaagcagacaaggcccatccccactacactggctatctgcaacgcatagcctcccatggaggcgatgtccaccaaaaaagacaatctctacaagagggctctagatcatgacttcatggggtgaaatgtgttgatagtaccccagtgagagacttgctgtgcccggaacgggatttagatcgcagtgaaaccgagggagaactcagggtatctggaatcaaggatcgaaaatgcgatgcaacggatgttggattttgtgagaaaccgaaaatacaaaaaaatcaaatccccaattgaccatctccccttattattaacaaaaatagaaccaatagataagagaaaggatgagatgcagaaagtgtacaaagataaatataaaaaaaaatgacggaacgccgcttccttgctattatcgtaaattcagatcgcttcaacaatgcaacgccccaaaatggaaaaatatgttcatggtcagtcaattcgagtgcaccgagtgggtgcccttcaagtggtcaggacaccagcactgcccgcaaaccaggtgaacgaagcgaaggtgatcacggccatgccgacggtgaatttgatagcgagacgactggtttcggacagagcgccgctgcaggtggcgcacttgaattctagacaaaggttagcagtctgtttgagcgaggatggttggtataaaaaattcaccattgagtggggtgtaagactggggtgtgtacatcccgaagatgtaaccaccattctgcgagctcaagtatccggcactcgcggtgtcgctaattttcttgctggcatcgtagatgatcagagtatacgatgcggtaagcaacggaatagtagccgatgactgatattttccagtatcccacacaaggcttccggtttgctttacgctcatgttggagctgagcgtatatgtcatcgagttgagactgcacgaagccacgacgttgaccgcagacggcgtgaccgacaaagaagtatagttccatacaaatgtcacatcctggccgatcttgtagtaggtcgtggacgaagaagcgggagtgatcatggacacgccgccagcagcggcagctgggtcaatggagatggaggtggtagtggtagtcttggattttcccgtcttcgtgccagttgttgtgccggtcgtatcagaatcggttgcagtgcctgttgtcttgcctgtttttgtgtctgtacttgtgtcgctgtttgtgtcggtgtttgtgccggtggtagttccggtggtggttccggtagaagtcttggagacagtggaggcatccgtggtagattcggaggtttcagcggtcgttgtctctgtggtatctgaattgcaggtcagcatcaagggcaatggtgtgataagagtcctgaattacctgctcgcttatccaaggagttacccgggagttctccatagggccgccatggccaagccgatgagatcgttcccagcaacaagatggtgcagaacacactcaaaataaaacaccgcatgtcgaagttttggagagattatctggaagttcaaaaatcaagcgaccgaggtattactccctgggctgaaaggtagactgatcacgccccttgcacaacccggtgtgaattgtcaaaaaaaaaaacacagaggcctcctatgtcgaaacaggcttatcgatttgatgtccgtaccaagcaatttcggttgctagggaaggacgatcaaaaggatgtgcagtgcagaatatgttattaatccccttgccagtctgggcactaaaacatgtagatctcgggagtgtggggtttcgactcggagcaacgatggtaaataatttcaaggcaaatagtaaacgactgtctttaccttcacagacaattggagagagggaagaaaacagagagaaagagaagatgcgatgtttgagctgtattgaggagctaagcccaaataggtagtggctgtccagcatgtgagacatgggctatttatagcggacaactgataactatctggactatgtatttggactatttggactatctagaataccaaattcattgtgctataaagctgagaagtgtcaagtctaagtttatactcgttcaggttgagcaacgcaaaagttcgactttatcagacacaagattgcttatatatctatcacattatgagcatgtaaatcatatgagcaccgatcatttattcttatcctttaattgatcaaatccatctcacactgaaacagaggggtctgcaatatatatgtttcaattcaggatatgtatgagtgataaccatgtacttcaacgaaaaccttcgaactgatattcaattaatcacctatcccagaagttgaccaacatccgactatcattccagggctacaaaacccagataagtgaatgatgaatggcagtgcaccatgacatagcatagttgcacaacacaacaaaccacagccctactctgtactatgaaccggaaccgatgtttgacgccagccatggagtaaactgtcatacctacataaaacagcgaccaactatactatactaaagggtatgatctacaatcgccacctggctgcccgtatccaaggtcgggtatcgctcggttccgccagagaagtttcctaaacgtgggggtggcgatgtagcaactcgcacccgaagactattacgaatttagggatgggatggggaagattgaaagatgtggggatctatgatattctctctcattgaaagactatatggcattggtgaggatccctatgtcgggagaagaattctacatattcgatatagagcattcacaggacatccatggatgttaagaagataacgagtagaataatcaagatattatcaattaagcctgccttatacgctgagatatgctgacatgaaaaaccaggacaagttccaaattttgaaaagaacacaaaaactagaaagcacatatcacaatctgatgttcgctacgagttgtaaaccaaaatccaaaagtctcaaaaccctctaagcagagctggtgggaatagcattgagctggatcctgtcacatccttccggaagtgcaggttcctgaacagtcttgctgaggaagtgcaagttggggaacaactggccggcctcgaaattggtggggcaccctgaaaaaaaaaggagtcagccattgcactcaacacgatcatgtagccttggaaaggggtataaaaatagaagaacttacacagccatccatcccagatctcactgggtccctgaacgccctggcggctgatagagaagcctcccgagccggaagtgggtttgacgctgatctgggcgcgccccttgcgagtgcctatatagtaccaatatcgttagtgatctgggctcggtaacagtcacattcaaaggtaggacagggctaagcttaccttccacgctgatcaggtcaagagtccaaggggacttggcctcggtatccaagataatggtgccattgatgaaggagaaggcggcagcgttgctagccgaggcaccagagaagacggcttcgctgttaagcgggtcgctggccaacccgtggccgacggagaggtacaggtcgttgtgagagctgttgctggaaccggaagtcctgaggttgaagagcttttgggatggggcggcggccacagcggtggctaggagagcgacggtggcgaagaacttcattttagatgatgagtgaagaattgggttgggaatgctttcaagttaatggttccttgaggggtttcggttgtttttatatgtttctttcaagagaggggtaggattttgacggggaagtgacgcatttatatgctttgggatatccatgggagactgtcgatgaacatgctccacaggtggagtgtagggccatcggactgtttcgagtgtcgaacgctgatccggatcctccgtatagagtagatatccttgaaatcaaaatagaagccgtcatcggtaaagcaggtagaactgtcgattgattgttcttcgacctcctttgactctataccctggcaatgttgctcatttcttcttctctttgtttttcttcgcagcatgcaaacatcactgcggttgtagtattttccttgatccatgctgccgtatcagaacctgtgtgtatagggtaaacgaaaggactaacccaccggatactaattacaatcgacatgctggaggtcattaagtgggtacctgactagctacaccatctaagccagtcatgatggtgatcgaatgcagatctcacccactggtgtgtcttctatccatcaattgaggcacctgaaacaaaggttggtggtattaatgatgtgattttgcccctatgattgggtcacacaatgatatatgtaggcgtaggatgaattttgtttcacaaatgatttcactaaaagaaaacccatcaagaatcataccagaatccccttgccaccgaagtaatccataaaagaagtcgacaaacaacgaacgccaagatcccgtggagcctttcccctgaatcctgtctgacttgtttaatatcgggctgcgactctacttcgtacaaacgaaaatctcttgcctatttggctcgatatgccctcgcttctatgtttttcgcatcattgataatttgtggtcccactagaaatagaatatggtccactgaaagcagtgaagttgagggctgttacatagttttggaaatattattagaatacccaacccctttctctttggtaggttacgtgcttacgattgacatgttgtttgatacttggcgtacatcatggaaggtgtgtatgaacgcatgtggcttgagttaaacggcagcttgcccctatgcgtgtaggaaccccttagtagcgtcacactaggcgttttaagcatgcgcctagtgggtactgcctatgtcgtatgccgtgatgtacattttgactgtgtaactgtataactagggggtatggcattgtctcattgtcattcattatctcgtgaaactcactatcgtacagaaagatagcctgttcgatttctgcccggggacgatctcagcccaccggctttttttccaagcccctcatcgtccccgattgctggcgttccgggcaaattcaggctttagagtccaccgacctcgacgatcacgaccatgctcaagtgtcgcaaccttcttcaatgactcctggaactcagcaacacgctgcggattggagcagtaatgattgaaatggtgaacaatcgactgcgacagagttggcccacgctgagaggcaaggtagtcacggatcaagggcatgaattctttgccgcgtggcatacgtgctgatggactatcagaaccacttgttctctgtccagcagccgcggcagcagcaggattgagtctagccaacaggtctgaagatgatggtcctgccccagcagggcgagccgagctaccaccagtccgtggatcttcgcggcctcccatcccaaaacggcctgtccaggtaggaagtccgatggggagtgcccgggcagtttcttcggctttgcggagctcttcggcggcttcgttggcgacgcggcgagcttcggcttcgatcatcttagggtctgcgcgaaggactcgtttaccgtttacgatctggtcgtgctgaacggcagagtgaacgccagaacgagcgaatataccatgcattatgcgatcttcggaagttttggcattattgtcctcttcggcggcgttctggaactcttcgacattggcaataccattaatgtcggtgataccgtcctcctccttgagagtcggcgcaggcttactcttgctgccatgagcttctttagcctcttcctggtatgtgacttcagcgttcttgaagagtttggtggtttccaactcgtcatcattttcatctgtaagagtgaacagatcatacagatcactcagctggaaaccttctctttgatgaggatcacgggtgattttattggtcaaaaattgtttgaatatttggcggtggtagattttctcttcgatagtgcccttggtcatcaagcggaaaatggtgacatcacgcttttggcccagacgccatgcgcgctctcgcgcctgcaagtcagtcgatgggttccagtcgggatcgtaaataatgacacggtcagcacctgtcaaattcactccgatcccgccgacacgggtggtgagtaagaatacgtggatattagggtcgttgttgaatgtgtcaaccagattctggcgctccttgatcggagtagttccgtccattcggaggtaattaaatccaccgagcgctccaaggaatttctcaatgatgtctagcatcagacggccctgggtaaaaaccagggtcttgtgaccagtatctctccacacctcaagcaaacccttcaaaaccttcatcttgccagaccgctctgcatcaccgtaatccgcgtcgcgagagcgcaatgtgtggtctgccaagtctggatggttgcttatcttgcgcagtatgtcaatgccaaacagagagtttcttttccctcgtatgatagacttcatgtcatccgagcccaggaacctcttgtatatggttcgctggagttgggtcaatttgcagaaaatgacctgttcgcttttcatcggcagatcagatgtcacatcagccttgaaccgctggagcagataaggactgatggcatctttgagagtttctgcacatttcgcagcagtctgcacttgaaggtttgatgcagatgcgtagccaccctgacggatggggatctcgaactggtttttgaatgtaacaaggtttcctaggcgcattggaaacacaaagtcaaatagggaccaaagatctaccagactattctgcatcggggtccccgaaagaatgatgcgatgtggagtccggagttccttgcagctgaaggtgataccggcatctggattgcggattttatgaccttcgtcaaggatggcgcagccccattcaacgtcaacaagagcatctgcataagactgcagacctgagtatgtagtcacgaggacatggccctcctccgtgacacgcttaatgatctttttagccgctttctgaccggcagataggtgccgagagctgcggctgctcatcatttctgatgaaagcgcattttcccgactgctttccttaccaagatttatcatcccgctgcccgatgagtgtaggatggagacacggaagggtggccaccagcggtgaaactcattaacccattgtttcataagagttgcagggcaaacaacgatggcaggtttggtgagtttattgctatgatgcagtgccgcaagataagaaatcgcctggatggtttttcccaaccccatttcgtctccgataattccaccaacagtctgttggtgcaactcccaaagccactggactccagttttctggtagggaaagaggaagcggctgatgtctccagggacacgcagtccattgtcaagttccatggccggttcggtgggatgtggcttaagccactcctcttcttcattcaggtcagcgtcgacatgatggctgtcagcgtgccgccgggcagagcttcgccgactgatccattcctggacgcgagactggtatatcgcctcgtttccatcatcaaccccactcaaatcttccagctcaatggtcgcttttccttgcttgcgcttgcgacttggcttggtctcaggaagagtatcaggcatgaactcttcaccctcggatgtagcgtcaccatcagaggcaacgtaacttgccgacgaatctgctcccagggagctacgacgatccaccttcttccgcttgctcttgctttcgctgctcgcgtcaaagtctaagtctgggagtgcaaggtcccggtgggacacggctgggtgatgtttggcttgttcgcgctcctcctcctcctcatgctgttggtcctcggcatcgacaagtgcatcgtgaagattaccaagtggcccatctctggagccctcctgcatcaatgcgaagggagtgatctttccagtcctcaggagatactcgcggcgggactcattcggctgtcgcccagacccgtgcgccaccgtcgagttgccctgcgactcacgcctctcgtcaatgcgctgttggatgtccttcaagtcttttcctagatcggccttgcgcatctgcagccttttcagctcattctcaactcgatggcgagtagcggctccgacgggctgtgtcaggcgttgctgggcttggcggacctgcgaatcgacccgtctgcagattaagttagtcacgctatcaaatatcaagtcatgcgctcttactcccgatccacgagggttttctcaagtcgcttgatgtcattctcctccgctttatctgccagagctttatcggcctgaaaaaaggaaagggtgagccagagtgatagtcaattgagacctgcctgggtcatacctggcgagtgatatctctttcgaggtcatcctggtcgcggacgtctgcttggagatcacgcagacgactcgcctcctcgttcgtggacattgtgaaagttgtccaaataaagattgcattaagtgaaaagaagtgagagactaaaagactttgtctagagtaagggataacatggtgattgctcaaagagcaaacacaatagtacaatagcacaggtagcaaaaagtctagatgaataacacaatctagatccatcagagcaatggcacaatcagccaccgcctatgataagcaccgctcacgtgagtgaatgactcattgaaagcttaggtaattctcatttcaggccccggggtctggaccggtagttaccacttctgttctcacctcgatttcacgtcttggtcagtccaacaacttcgttctttttacccgtggatctctcaaaccttgaaatgtacaaatatgttcacggacatcacagtgtgagaaacctcggatgaaaaagtccttgatggcatacagaattcgaggtgatgaaagcctagagcgagcacatcatcaggcctaacacgttgggataacacatatcgatccatatcatgcacgagcactagcctcacaaaattgttcgtatctggtgatctgaaagcaagaagacggttgctctcctcaaagtacgagagtagggcatcaagccaagaaaagagattcgatcttaggagtgtactacatatttgccagataatccgcaatggctgaaaatcaccatgcctaagagtacttttcttgattaattatctctatattcagaataccataccattattccaataagatgatcaatcccaagttgtgggctcccggcttaactaggaagtgacgtcccatgcctctccaattatatgataccatcaagaagataccccgttattaggtcattcaatattagtagttagttagtaaatccgttcagcctgatgagattacagccacttaataactcgaaagagacgctctgacagttgggcatgcaaatggagcgtcgatcatgtgaaaccagtaatcgccagggagaccacaatccagtactccgttcaaatgtcgagactttagcatcatggtcttgaatatatatgtgcatattgtataccaaaagatagaataccccttcaatatgccctcgtacagaggaaagaaatgacatactatatagactcagatctagcgggcaaagttcacctccacttcgttggaactcatctttccccctcttcttgatctctggctatatactagtaatatctctatgcttcgataaaagccattgtttaacatagtttttgttgatgctagctgtgtctttacagagatttccccttttcacgggggcccaagacaagtccattgacttggctaacccccccagccgcctacgtctactgcgtcgcaaccaaattgcgaccgccccccctctctccctttcaaaacttgtcttcaccaacaatttctcggatgatgaagcatagcacgacctcattttaacgccaattccctacttttcattctctattcgtcgaattccgtcaagactcgcctcgaacgtgcgatcgcattacgagtgccgactccgctggcatcccacggaccctgatcgcagtgcttgagaacacggaccccgaatccatttgttggcccaaaaagagggcttgcacaaaatggatcctgggtggcagccttatcaagatcctttaatgggccaccctgcgcagttcaatactgcgttggcatctcatccccagcaattagcctcgaaatacggtcagccaccacagtcacagccgcccgtcggatacacgtacgaaacattccagacccccgtcacgacatctaaagccccctcggctggctcaaattccaaaactgtctccatggcgtcctcccccactgccacgccacgtactcgggattatgtcaccgacgcggatactaccatggaggacgctgacccgtacaaccgggcaaagtacccctcgaggccaaaccacaatcgcgcctcgtcacaattcttgaatcaagcagaagaatcatcggctgcccgcagatactctccggggaatgttctttcgccgccgatgtcatatcccactagtcctggcaagtcccaaggctcctatggatttccatccgcgcctcagaatgcttcccgtcggtcccccgcgagaccagaatatgcatcaccaccacaaggatatcaatcgccgccatgtgagttcgatctcggtctcttgttcggccatgtcccgtttgctaatatctcgacagccaaccggcccccaagactccctccccttcaatccggcgacctcagcccagaccagtactacccaccatccgcatcttcccacatgagtccaggttttggtccaggggcgcgatctccgcgatctggctcgctgccatctcaggctcctctagtgcccggtcgcggtccagttcccaagttccaaaagattcagtctgtccaagaactgaagccgcgcatgaatatacagcccgcctatcggcgcgccaatccagagggtggatttatcagtgtgagtgctccgcaaacctcactttcttgtcgcgttggctaacccgtccagccacttcaatcgttgacaacccacctcccggccacttaccgcatatgcaaccctggctttaactatgagtcttcgagaaacccgcgacgggtattgaccaaacccagcaaaggggtcaagaatgatgggtatgacaacgaggatagtgattatatcctttatgtcaacgatatccttggaagcgaggaagccggtcacaagtatgcccccgatttcccgataatagccgaaccctgggctgacagttgtttctccttctgatttagaaatcgatacctcattctcgacgttctaggtcaaggtaccttcggccaagtcgtgaaatgccaaaacttgaaatcgggagaagtagtggctgtcaaagtcatcaagaacaagactgcctacttcaaccagagtatgatggaagtttctgtgttggatctcgtatgtcatattcccccaacccctatcgttcggatctccgctgattacccgcagctcaacagcaaatatgacaagaacgacgaccaccacctgcttcgtctcaaggatacattcatccaccgtcagcatttgtgtctcgcattcgaattattgagtgtgaatctttacgagctgattaaacaaaaccaattccgtggattgagcactacccttgtccgggtgtttgcccagcaactgctgaatgccttgagcttgttgaacaaggcgcatctgattcactgtgatttgaagccggagaatattctcctgaaaaagtcagtatcgcctgtgagctttcagggtcagtttctaactgttcacagcctcgagagcccgatcatcaaggtcattgactttggttctgcatgcgatgaacgccagactgtctacacctacattcaatcgcgattttaccgttccccagaagtactattaggtttgccgtacgtacactggtctcacatgttttgttccttattaatttgttcctagctactcatctgccattgacatgtggtcccttgggtgtatcgtggtggagctcttcctgggtctccccctgttccccggctcttcggaatacaatcaagtttgtcggatcgtcgagatgatgggtatcccaccaacatggatgctggagatgggcaagcagtcgggagagtttttcgaaaagacacaggacgagttcggaagaaagacgtaccgcctcaagagcctggagcagtattcccgagaacacaacacgaaggaacaaccgagcaagaagtatttctcagcctcaacgctggaggaaattatccggagttacccaatgcctcggaagaacatgaagcaagcagaggttgatcgaggtaagtttcccttttccactttcaccctgagactttctaatcatcgcagaactgaataaccggattgcatttatcgactttgtacggggactcctgtcaatcaatcctctcgagcgatggtcaccccaacaagccaagctgcacccgttcatcacccagcagaagttcacggggcctttcatgcccccaatgaacctcaagtattcgacggccactaaaccggcaccgggagttcaacagcaacagcaggccgaagctgctagcaaacaaagagcagctcaggcggcgcatgcgcaaaatgcccatgccgtgcagatgaaccaatttcatactccacctcagccccaaccccagccccagcctcaagccccgcccatgtacaatggcatgtacccacaaggcgcgccgcctcctccataccctacccagcagtcccctggctacggtcatcaaatgggaatgatgccaggcaaccaggtacctcctcaaagtctatacgcacaggcgaccacgcgagcaggccgccaacgagcatccaccatggaccccaacggaggaattcccactaccatccaacgagtcgctagccacctggatcccaacgcgccaattcgattgcagcccagccctgcgtattatccacctcctcctgacgggtacgtcgatgctaatgccagtcaacggcgtcgtgggagccgagcgggtaatgcgaatggaaaccaacgcaatcgggattttattcgcacccttgaagatggtgtgcttagcgaaggatacatgggtcagaaccaatggcactagggaattggggcaaaagggcaattcccgtgcccagcgttctctacgactcgggagcaggcatactgatatattttgttcacgggtgtcaatgacctccaaggcactgcatttgtaagccttgctctgctgacccattccttgccagccgattcgttcttatatggctggctcttgtaggtatgagtcaagaaaaataccccttcagtgggttaacgtggtctacaatgatctggaccgctgatacacgatctgcattgctacctagcgctagatcgattcgcacgcttacttgccgtgagctgtgcccatcagtggccaaatcattcgccgcgagatatcactccccgcatcgtcatcactatttcattgcgtttcagtacgtttcgttacgtttcttgccctgttacgattccaattacgtttctccgatttctttaggcagtgcttcggcatgtctgtctgccttttcgtgaattttctctttcagcatagcctggatggagcatgaaagaacgatctcatccatttctttttcttctctcctcgtaactgtttcacttaatttgcaatcttcctagggatgctgatctatcctttttttctttcttttggtcgaggtaagcctctcggtcgcatgtcatggcatgtcgtttctttcgggaggttccttgttttatttactgcatgcagtaaatagtagagttaatagtcagacgataaatgggacaaacgttacgggttgatgagtgtatcattttgcccatattcactagtcaagaaacttctttgcctgcgcctgcctgatcggtcaggccttgattcccggatgagaggcggtttcccaagtacaagcagataaaagtttcctagacttctttttcggatgattcgtactcttttgaaagtcagcggatagtcgaatagtcaaaacaagcaagcagaagcaagtcgaaggaatagaagaagtataaaaaaggccgtcactatttctttgttatgcgctatacctaatctagtttagtcagcccctcgcttaaatttcgtgtgtggctctcaactgcgggaacttcgactttgtatcgccgacgacctgattttctagctttaggatcgccacttccttttaacgaaaccgcaatccgcaaacatggcgtcgcgtttcttctacggcagcggcagcgacagcgacagctcgtctgatgaggaggaggaggtctaccgttccggctccggcagcgaggaagattctgaccaggatgactccgactccggctccagcagcgacagcgacgaagagggcgaggagggccgcaccggtgcctccaagttcttgcacgatgactccgaaagcgaggagagcgaggaggaggagaaggttacaatcgttaagtccgctaaggacaagcgtctcgagggccttgagagcaccatccgcctgattgataacgccgagaagatcaacgactgggctgttatcgccactggtgagtctatacgctgcctgggaggagtgaagagccagccaaattggacgaccccaagaaattgcatgaactgacatgattcccaaacagagttcgacaacctgaaccgccagatgttgaaggttaccggtcccacccccaaggtctacatccaagccgttgccgaactcgaagacttcaccaacgagaccgcttccaagcagaaggcctcgaataagaagatgaacgctagcaacagcaagggcttcaacgcggtcaagcagaagattaagaagaacaacaaggaatacgccaccctcgtcgagaagtaccgcgctggtaaggaagccttcatggcagatgaggtcgaggagaagcccgcccctgctcctgcccccaagcccaccaaggtcgagaggatcgagaacttcgctgccgccgtcgctgcaggtggtgaggatgatggattcgctactgtcggacgtggtggaaagaccctccagtacacccctgagagcatcctcaagcacctccgtgtcattgttgagtcccgcggaaagaagaacaccgaccgtgccgaccagatccgcaccatgcagaagctcctcgaggttgccactactccttaccagcgcatccgcacctacatgaccctgatctccacccgcttcgatcttactgccacatccaccgccacctacatgtcaagtgagcaatggcaggccgcaaacgaggaatactccgctctcctttccgtgttggaagaaaatcgccaattccttgtcagcgaagccgccgatgagtgggaggacgacgagaagcaacctactgttgccgagggtgaaaccttcttcattcccggttccgttgtatcacttgtggagcacctcgacgacagcctcacaaagggtctccgcgagattgaccctcacacctcagagtacattgagcgtctgacggacgagcaggcactttactcctcgcttgttcgctcgcagctttacgttgaaagcctcaagggtgccgataagaatggccaggacagcatgaacagactggttatcagacggttggagcacatttacttcaagcctgctaatgtcattgcgattgtcgagcaagcgaaggacaaggcagttctcacaaatattgagtcagcagttactgctacctataaatctggggatgtccagagcctcgtggcctctatctgcaactacatgttcgaacacagtgatggcattccccgcgctcgcgccatgctctgccaaatttacttccttgctctacacgaccactactacaagtctcgtgacttgatgctcatgtctcacctgactgaaaacatcgccactttcgatgtcagcacccagatccttttcaaccgcacccttgttcagattggtctctgtgccttccgtgctggactcatctacgaggcccagaacacccttggtgagatctgtggtagcggccgccaaaaggaacttctcgcccagggtatcatcatgcagcgttactccactgtctcgcccgagcaggagcgtctggaacgccagcgccagctgcccttccacatgcacatcaacctcgagttgctcgagtgcgtttacctcaccagcagtgctttgcttgaggtgcccctgatggctcaaacctcatctgcccccgagctgcgccgccgcatgatctccaagaccttccgccgtatgttggactacaatgagcgccaggtcttcaccggtccccccgagaacacccgtgacggtgttattgccggagccaaggctcttgccgctggcgactggaagctttctgcctctacattcgccgcgatcaagatttgggacctcatgccccagcccgagttgatcaaggccatgctgtcccgccagacccaagaggagggtctgcgcacctacctcttcacctacgccccctactacgacagcctctccatctcttctctggccaccatgttcgaacttgagcccaagaagattatctccattatctcccgcatgatctcgcacgaagagcttgccgctgctctcgaccaggtcaacgacgccatcatcttccgcaagggcgtcgagctctcccgtctccagtcccagattgtcaccctagccgacaagtccactaaccttctcgagtctaacgagaagaccctcgagcagcgcacccagggtatggccaacgccttccaacgcgaacacggtcccggtgcccgtggcggccgcggtggtcgcggtcgtggtggtggtcgtggcggtgcccggattccccagggcgatcgccgacccggtggacagcagtttggtggtggtgcattgggcgcagcgatcaaggcttagattctgatgtaatggcatgttctttctcttttttcccccctttcttcatgttttccttttttactcctgtcatccccttcgtgttggtacgaccgttcctttttttttaggccggaaaaattgccccgtttctgcgctttttttgtgattgatctacatgatattcacgtatggaaatgatcgagaaagaatcaaggtgcatactggttagaaattgacggcttatggattagttcttagttttggtgtgtgcggtgtttgtagagttatatatgtactgtaggaagtattcgagcctcctcatagatcgtaccttcgaacgtacaagtgggcttctcagagatgaaacctggcggcttctttgtcactggttctttcacaccactaacatctcaaatgctttgaattggaacaaaattccggatttgtcactcttcgcccgttgtttgtaagtctctctagcgtgtttgaacgaccatactttcctcgagccatttcacaagctgtcgacaatatccttccttgaggtaccattttctcggatgctgatcaaggcgccatttcacaatggagttggcgagcgagaagctcgaaagggccacgctacatcagactggaactataccactggtcatctattacgctttgcttctttgccctgctgtgctttgacaaaaatgcccggtccttttgacatcttctttgattcgagccttcaatcttggacgtataaggtacatcaagatgacacaaagaaccttgaagcaacaccaggggctgaattgcggagtgaacacatttcaacctcaagtcacttcgattgatgagctacaatcccgaggtcccagggttactctgtcgaattcattgttgtcgagcacatgagcttcttgaaagatccaaaaatagcaccttcccctcgatcagtttgtctctatccacacaagattaccttcctctaatccctcattccaatttgtcgttttctttgtcttgtaaaattccacaggatggttactacaaatatcttctctatatcccacatctcaatgcttcttcttcatcccaagttgccaggccctctcctgcagtgctgcaaagtccatctcctttttcttcaagatgccccctcgtcgtagtacgaagcgggcgtactcaaagccccccttggaccctgaggaatctccgaagaaacgcaaatcgaccaacggtaaaagggagatttcttccccttcctctgatttttcatcagacgaaattgaaagtcaattgcccctcttgccagaggactacgactaccttgactacagcatgatgtctcaaagtgtccaggatgaagcgtattcacgccctccgagacaacagcgatggaaacacaatggggccaaacctattaccgatccagcgcttgtcccggaaggttggaatgcggacgaactagatcttgatgtcaatgatatcgatagtcaagttgagagatgtatggagaggatcagtgagggaatcttgccgggtttcttcaagttcagactctcacaatatgagaaaagaagggctgctcgcgatgaaatggtccattctgagccagccggactcagcttggatatcgttcgacgcctgggccatttgaaggctatcgagacacatctcaccacgaatgaggacccggataatcagcttcccaatgtcaaggctctcatcaaagcttacagggaaggaaaattgggctggtcgagaggatgggtgagctactggtggaagggcatgcagctcaatgcgccccataagtttgacgtcgatgttcataagaacatggctgagcagtacgacaacactaaggcgtggtgggtggaaggtgtaagttgatcatcactacatacatacgaacattattcttgattctgacttgagatgtcaaatacagcttcaacctccaggcggtggcagtctaggaggttttcactcgtttgcaccgtatactaatgtccacacaattcaggtatagtgtctatttggtctctcagcttattatttcttctttctaactttcatctcttgcctttcatatagttcccggtgcatatatcggctgatagtcaacttcctggtgctagtggcctcaccctatacgtgtgccatgatactggtgccgatattatggcgatacctcaatgctatatagaccagctggagtcgctaggtatccccgttccagttcacggctataatattatggaaacacctggctcttcatcatgtcacaaggttgtggaggttgacgtccgtctgaccgacaacaacggccaacctttgacccattggatgaaaatacaggcctgtgtcatccaatctaggcccggggagcactttggaatgcttctttcggggccttttgtgcggttcgcgctctacactgctacatgcccagatgggcagggacttctctatgtttgtaatcacaagaaggagctaaggcagctgccagccatgccgggcgactttgtgccaaggggaccaccatttgtggctaccacccgtccagctccggatggtggagaaccaccctactttttactacaagagacgcaacgcatgagaccggcaacaatgcagccgccccaaattccgctaccagcgaagacaccagcgaggagagggagaagaaaggggaagggagggggcccttagtgtcgagtgttctgggatctgtacatggactcggctgtttcattttgacttgctctcttgttgattaggttctgcgtgttcctcactttcttggctttcatatcagacattttgttggattttatactggatttcatctttcattatactttcgttatatatctgctccaattgagacataaaatctcgcactgaactccctcaacacctctctccccttggatattgtggagatccaccaggctttgtagataaccaagccctttgaaaggctttctctcgaagacatcgcggcactcatttcctcaactagcatatcacacagtcttgtagtcagccggccttcgccgccttgggagggtacttcttcccatccttctcaacttgaggtgtacaggaacaccactcgcctttgggaattgagtccatcaccgaagggatatggcttccacagccccaccaggtgaccttgtctgtaataagtaagtactggtctgttgacacagagatgggtggaaactcactgcaggtcgagcaggtagccttcatacacatgatgagattggttttgtatattggttttagaaggaagatcgctgaagtgggaatgtcggaagatttggcttttatattcttttccctccgatattagtcatagccgttaggaccgcgggggaggggagttcgccgatgtctgaagcccgaatccccgatgtgtggtttctggggatttgattggagtttggcaatatgctgattaggagttcgaaatagataagcagaagcaggttattctacgaatgttcgaatgtagcctttataataggagtagaagtactccgtaaatgtttgaaaatctgcagattcttggtggggttatcgcccttccgtggcaacttcaactattttaactaccacacttctcaatcatgacggtcattgctgtggctggtggaactggtggagtgggcaaaactatcgttgagaaattgctggactccaacttcgacatcgtcgttctctctcgcactgtacgcaagcagagacactttccacctgagaaagtaactgacctccttaggtgaaacgggactttgcttcgcagaatattcaaaatgtccagataaactacgatgatattccctcaatggcacgcgtacttgagaaacacaatatccacaccattatatctgccattggtcttgtttctgacgagacaagccagtctcaattgaacttgatcgaagctgcggagaagtcggcaacaacgaaaagattcattcccagtgaatactcattcgtccaaaccaccgagtaggccggccagcttcagctgtatgttattctatgctgatattgaatcttctaagattactcccgattgaccctagcattcaatactggcttgatgcggcagatcgtctcaaagccagcggcttacaatatactaggataatccctggtttttttatggactattggggaatgccacatatccaaactcacctgcaacctttcacctttggtattgatatatctagcggcacagctgcgattccaggagacgggaacaacgtgatctgtatgacatacacgtacgacatggcgagttacttggtcaaggcacttgaccttgatgaatggcctgaattcagtgtaatcgttggagatgaaattacctacaatcagattctcggaatggcggaagaattcaccggtaagcatatcggacgcccttatttgagatacacccgcaacctaataattatatccgaaacaggcaggaaattcaaggtaacttacgatagcctggagcaaatcaaggccggtgatgtcaccgttcctctgcagccagagggaatagaatactcatcggacgaactcaaagaagtgactgcgttggtgagcagactcactgtcaataatgtctttcgactaccggatgatcgtctcaatactcggttcccagaggtgaagccaactacgatgagacaaatcctacacaatgcctggaacagaaatagcacataagttcatcaataccagcaagcttcagaactttgatttcatgaatgatcatttgtaataaaagtgcaaacagaagtcagaactcgaaaattatcctctcattacctccattgaagagtaggatcaaagccttcggtgatattatgcattcgtttctttgaactacaatagcagtaatccagacgtcaacctgattgtctagcagacaggcccgggacgctcgactgcaacacagacctgtcggcctggaatcagattcgagcaccaggggttaatgtcgtcgttccagcacagaagctggctcatggtgaacctattctggttccgcgcgatgatgtcccagcaggtctctccattactgacagtatagaactcggtacctgattttacgtcagtctagcttgagatagagggatttgttttagcttaactcacaatattgtgtcagctgccagccttggacggtattggtgttgacggcggcagatgtgccaagggaagcaattcccagaatgcataggagagatcggacaccgatggcaaccattgtgggctttggagatacgcttggacttattgactatatgtgtctggagactagcaatgggactgaagagtgttggtgattgaataaagaaaacttgaaagggattacttgttacttttatatgtgggatttactgagccgcaaagtactaaaggtcgaatgtcgggagtgatcttttgccttgccggacaagttcatatgacttgagaagtaccgtacctgcaaaataagcgggtaagggcatataatccagctataggttgcatttagattctgttgttgcaaccatagttgcaatgaggcgctgaaacaatgtgaacggcaacatcgcgaaattagccaatgggttcagtgggctggtcttcaccatggcttcgttcttttccattgattgatacatgtctcggcttgaccgatagaagtacgtcctgttttacggttacattgttttcagatatgattcctaaagggagagtaaccttggtccagggaggcctagtcgttatgcagataatagtgtgacaatgacctgagccataaccattcaccgggggtagagcaaaggtagcgcaaacagatacctaagacacagctgaatcgtgcgacaagattcaatagtcatggcggtcagtgagcaatcattctataggcgatgcatttagacttgattatggttcgcggctatttgctatggctagattgggttgttatacagagtaacaccccgttgcatcgccatgggtttgagcaaatagttctttgggatagctggtcctatgacagaattcggggaagaggttcgaaccatggaatttgacgagctcaagatattgctgatgcagatcaaagtacatcgacggaacctatgttagggagtacaaggtgtacaggatcacccaattgaatcaaatgtttatatcatattattgatggtctgatggtggtaaagggttattaccactctggtctgatctaacacagtgatatcatgccttctgctccagttctctagtttacctactgtggcactgattacctggggctgctttttcgaaatctaggaatagcatcagaaattggctgaccagaagagtgaggtctagattcatgactcgaaaaagaggttatttcgctatgcagaccgatgtgggaagtttgaaagtccaagttttccagaaagccaagatggttctaggccacttcttcggtaggccgttgatcctccccgatgaatatttcacagcgagtgcatttaatcagaaattccaatcatgcagttatctgcggcacaggctgtgactccgatgactaccgaggggaagtgttgaaaccgatttactagttgtacatcgtattggcctgaggcatatataatgactcagcatcagtgcctaaatgcctaaacgcttgaatcccaggagtcagtgggaacctcagctacaattctttatcctgatgattgcagccgattaggggttgcaagtctgaagcttttctttggtgatactatacaatcgttttgtatcatggatggaaacaccagcaacgttgtacgccttgccaaggtatcgactagcccccagatggcccttatggcccccatatattgagggaacgactgtgattggatgctgacctgcatacacaaacaaggcatgcagtatatgcagacggaagaaggtcaaatgtgatggaactcggccggtctgtgtcccctgcagaacattcgacttaccttgtaagtacgaggacaccgtgcgacggaagaaaaaactcaaccggtatgttctgcttggcttgttgattctaaattaaccatattgacttactcacggtgaggaacattttcatgagctggaacagcgcattcaatctttacaaggcgaattaaatcaaacacatgcgtccaagagacagcgactgctgagtgatgaggagacaggcccagagcatatccaaccgtcagaagcgtctgattcagagttaccatctccgagaaatgacaacgccccagcatcattcgaggccgaggccgatcgagacgatggcgatggagggtcatatacccttaaaactccgcaaggctcaatgcgattttttggtgagtattggctcgtcaactatccttcctcaacggtcgcacgaatggctgggctgattctaccgactatgcctaggtgcatcctctcatttttcaattgttgcccctgagggtgtgggctggcttgagagcaagacgggtaacaatgtatggcgccatgtcgctcagagaaacagcactcgatggagactagccgactggtatcctcgaactcttcaagatgatttgcaaagcagatgctcgcaacccttaccgtccaaggcggtcatcctagaccttattcgtgaatattttgacacgttcaacaaggccctacctcgaccctaatgtcccttctcatattaagcatggtgagtattatccagaaatctcccttaattcaaacgttcatcatcatgaaaccatatctgacctatgatatttgtagaattttggatgatcaatgccctaccagctggtcctcgcagtctaaaacacagcacgtctctttgtacgatgccagacgattttgaggctggatacggtggtgcacaagcggaagcagtcacgttaacagccgatcacactccgggtaaacctagctggattacattttgtgctggggtgtggtctgtgttgcaatttcagacgaaagtctggtatcaacctgcacagaaagcagcagttgtgaaaaacggtgaattcctttataatatgatacacaacacaccagagcgactcctcgcgcatgagttcacccacgggcatacccaatttggtgcttatcgtgcaagtaagtacttgaccatgcgacttccaacatatcggtctgctaatgaatggttctataaactgttttagtggataaagcgtatggctggggacctattgttgcgcttgctaaaaaagacaacgctcaaactgatgctacccagtcactggctgtcataaatgctggtacagtttcttttctgaaatattgacttgtgaatcttgctaattatctctagatactttcacatattggatcaatggtaagttgcagagatccttatggctccccaagacgacaggcgctagattgaactaaccaccgacggctaggtgtatacttggagatgtgcaacttccgtagcgggaggtgtgaagaccctgatgaagcagcaaaaacgccctaaaactcggactcttcctgactcactgtgtgcaagcaagtcttcctcgggcctcttcgcatgtgagtatctctgcttatttggtatccccggggcccagttttgatcttagagcatattcatctctgtgcctattcattctaacaagcaagcgaagtgttccagttgttccaaggttggaaacgttacatgtgactgttgtcccattcacgtatcttgatagtaaacttggaaccttttttcttggtatataatggagaaaatccgtaaagagaaagacatgcaacttctattaccttatattgattgaatcgaatgcagtgttaagactgtaatgatagagctaaattattcgcagaattattgagataaatgcaagctgacattttcctaatatcggtaacatccaaaagggcatccccaggtcggcttctttttccttttgcagtcacagtctaatctagtaaatgagccgctgtccttccctatcatcttgtcgaaccaatcctccatttctagcttccattagtaactacagagagtaaatagggaggtgccactaaccttcgtcttccttatactttataatgcgatcggccggacagcgagcaattggccttaaccgggaaatccaatcctttaacgaaatattggctttgcgaatatcaaaatccactttgcccctttgtttatctgtagtgtcgattctttcgaaatcataataattgccgtcacagataatatcttccagagagagtgtttctagagataactcgttccgtaaaatgtccaaaaagctgggcatagaagtgatcttttcttcgttgcgttcccatgccatcacggtttcccgggtgggacagacaaaacctccagctgtttcagatggctcatatgggtgatatgtagacatccactttctgctccaatattcttctgtcgacgcctcagaggaatcggaagtcgaggaaagctggggtgattggggtgcactttcggccgatgctgtttctgatgctggtaggactgataggggggctggtccatattcttgcggggacacagtcggtgtgtacggtgacgatgttgaaaatgatggcggtgttggttgaaatgacgggactgtaggtccatatgatggcaaggttggttgaaatgacgggactgtaggtccatatgatggcaaggttggttgataagatggcactgtgggtccatatgatggcaaggttggttggtatggtagcactgtaggttgatatgatggcgatgtatatcggacagatctttcattttcctggcggtcaggggactcagcatcttgcgatcgagggttttctgtggctcccgactcctcgctgcctattgtaacccgtctgactgtaagagtgaccagacttttcttaacactgagcaatagtgatctcaaagagctgaaattgatatcaagcttgtttatatgaagctttcggagtcgagtgaagccaatgtcatggaacatgtttccaacgtagccttttgccggataggcatgcatgtcatcttgaataagataaaaaggcatatgatcttgcgacaaggtcagtacttccagttgaggtccaagcttcctgaaaagtttcagccaagctgcctcattgagatcaatgcataaatgaagatcctcgaggtcttctaaagtagacagcagagaatctaattgctcttcggagagggcaatcctagggccgatatcataacagaatttagaatcgcaggtagacagctttcggggtctgcagcttgagccacataacgcaagaaaaagctttgataatgccaaggagtttagtttccgtatctgactagccttattggtacgcatagactcttgcaggctataaacatcgaatcgaaaatcgatctggctcatcatctgtcgcctgccgaggaacggaactgtctgctgccggggatcaagcaaa
